(19) United States
(12) Patent Application Publication
(10) Pub. No.: US 2025/0283871 A1
(43) Pub. Date: Sep. 11, 2025

(54) COMPOSITIONS AND METHODS FOR MODULATING THE INTERACTION BETWEEN SS18-SSX FUSION ONCOPROTEIN AND NUCLEOSOMES

(71) Applicants: Dana-Farber Cancer Institute, Inc., Boston, MA (US); The Trustees of Princeton University, Princetion, NJ (US)

(72) Inventors: Cigall Kadoch, Boston, MA (US); Matthew McBride, Boston, MA (US); Hai T. Dao, Memphis, TN (US); Tom W. Muir, Princetion, NJ (US); Nazar Mashtalir, Boston, MA (US)

(21) Appl. No.: 17/905,875

(22) PCT Filed: Jan. 21, 2021
(86) PCT No.: PCT/US2021/014367

§ 371 Date: Sep. 8, 2022

Related U.S. Application Data
(60) Provisional application No. 62/989,238, filed on Mar. 13, 2020.

(51) Int. Cl. G01N 33/50

(52) U.S. Cl. CPC G01N 33/5011; G01N 33/5091

(57) ABSTRACT

The present invention is based, in part, on the identification of a minimal region of the SS18-SSX fusion oncoprotein that mediates a direct, high-affinity interaction between the mSWI/SNF complex and the nucleosome acidic patch, and methods and agents of modulating the interaction between the SS18-SSX fusion protein and H2A K119Ub-marked nucleosomes to treat synovial sarcoma.

### CROSS-REFERENCE TO RELATED APPLICATIONS

[0001] This application is the U.S. national phase of International Patent Application No. PCT/US2021/014367, filed on 21 Jan. 2021, which claims the benefit of priority to U.S. Provisional Application Ser. No. 62/989,238, filed on 13 Mar. 2020; the entire contents of each of said applications are incorporated herein in its their entirety by this reference.

### STATEMENT OF RIGHTS

[0002] This invention was made with government support under grant number K99CA237855, 1DP2CA195762-01, 1R01 CA237241-01, 1U54 CA231638-01, R37-GM086868 and P01 CA196539 awarded by the National Institutes of Health. The government has certain rights in the invention.

### SEQUENCE LISTING

[0003] The instant application contains a Sequence Listing which has been submitted electronically in ASCII format and is hereby incorporated by reference in its entirety. Said ASCII copy, created on Feb. 26, 2021, is named DFS-24825_SL.txt and is 1,165,513 bytes in size.

### BACKGROUND OF THE INVENTION

[0004] A synchronous combination of histone reader domains, chromatin complex conformations, DNA-binding transcription factors (TFs), and other features are required to orchestrate the appropriate targeting of chromatin regulatory machinery in eukaryotic cells. Chromatin reader proteins play critical roles in mediating the engagement of regulatory proteins and protein complexes to specific features of nucleosomal architecture, often to facilitate site-specific catalytic activities. These include bromodomains which recognize acetylated lysines (Fujisawa and Filippakopoulos (2017) Nat. Rev. Mol. Cell Biol. 18:246-262), PHD domains which recognize methylation and crotonylatation of histone tails (Hyun et al. (2017) Exp. Mol. Med. 49:e324; Xiong et al. (2016) Nat. Chem. Biol. 12:1111-1118), and increasingly appreciated, nucleosome acidic patch interacting domains of SNF2 helicase-based chromatin remodeling complexes (Dann et al. (2017) Nature 548:607-611; Levendosky and Bowman (2019) eLife 8, doi:10.7554/eLife.45472; Dao et al. (2019) Nat. Chem. Biol. doi:10.1038/s41589-019-0413-4). In parallel, TFs recognize their cognate DNA motifs genome-wide, and, when tethered to other proteins or protein complexes, such as chromatin remodeling complexes, can direct their global positioning on chromatin to achieve cell-, tissue- and cancer-specific gene expression programs. For example, TFs have been shown to tether transiently to the surfaces of mammalian SWI/SNF (BAF) ATP-dependent chromatin remodeling complexes to globally reposition them to sites enriched for specific TF DNA-binding motifs (Sandoval et al. (2018) Mol. Cell 71:554-566; Boulay et al. (2017) Cell 171:163-178). Importantly, results of recent large-scale human genetic sequencing studies indicate that perturbations across each of the above classes of chromatin-bound factors represent frequent and recurrent events in human cancer (Kadoch et al. (2013) Nat. Genet. 45:592-601; Valencia and Kadoch (2019) Nat. Cell Biol. 21:152-161; Kadoch and Crabtree (2015) Sci. Advances 1:e1500447), intellectual disability (Iwase et al. (2017) J. Neurosci. 37:10773-10782), and other disorders, with mutations ranging from point mutations and deletions to fusion proteins which alter target engagement and activity of chromatin regulatory complexes on the genome (Wan et al. (2017) Nature 543:265-269; McBride et al. (2018) Cancer Cell 33:1128-1141; Kadoch and Crabtree (2013) Cell 153:71-85).

[0005] It has remained elusive, however, how nuclear fusion oncoproteins that lack canonical TF DNA-binding or recognizable chromatin reader domains yield altered, region-specific targeting of chromatin regulatory proteins and protein complexes. For example, the SS18-SSX fusion oncoprotein involving the BAF complex subunit, SS18, and 78 amino acids of one of the SSX proteins normally expressed only in testes (Clark et al. (1994) Nat. Genet. 7:502-508; Crew et al. (1995) EMBO J. 14:2333-2340; De Leeuw et al. (1995) Hum. Mol. Genet. 4:1097-1099; Smith and McNeel (2010) Clinic. & Dev. Immunol. 2010:150591), is hallmark to 100% of cases of synovial sarcoma. Incorporation of SS18-SSX in to BAF complexes causes biochemical changes, such as the destabilization of the SMARCB1 (BAF47) subunit, and results in de novo BAF complex targeting to a highly cancer-specific set of sites, particularly, broad, polycomb-repressed regions at which polycomb complex occupancy is reduced and gene expression is activated (McBride et al. (2018) Cancer Cell 33:1128-1141). Although some studies have indicated SSX interactions with chromatin-associated factors (Banito et al. (2018) Cancer cell 33:527-541), the mechanism by which the site-specific binding and unique biochemical properties are achieved remains largely unknown.

[0006] Accordingly, there remains a great need in the art to identify therapeutic agents and methods that target SS18-SSX fusion oncoprotein to treat synovial sarcoma.

### SUMMARY OF THE INVENTION

[0007] The present invention is based, at least in part, on the identification of a minimal region of the SS18-SSX fusion oncoprotein, the hallmark oncogenic driver of synovial sarcoma (SS), that mediates a direct, high-affinity interaction between the mSWI/SNF complex and the nucleosome acidic patch. This engagement results in altered mSWI/SNF composition and orientation on nucleosomes, driving cancer-specific mSWI/SNF complex targeting and gene expression. Furthermore, an acidic C-terminal region of SSX confers preferential affinity to repressed, H2AK119Ub-marked nucleosomes, underlying the selective targeting to polycomb-marked genomic regions and SS-specific dependency on PRC1 function. Together, these results describe a functional interplay between a key nucleosome binding hub and a histone modification that underlies the disease-specific chromatin recruitment of a major chromatin remodeling complex.

[0008] Accordingly, in one aspect, a method of treating a subject afflicted with synovial sarcoma comprising administering to the subject a therapeutically effective amount of an agent that inhibits binding of a SS18-SSX fusion protein to a nucleosome, optionally wherein the nucleosome is an H2A K119Ub-marked nucleosome, is provided.

[0009] Numerous embodiments are further provided that can be applied to any aspect of the present invention and/or combined with any other embodiment described herein. For example, in one embodiment, the SS18-SSX fusion protein comprises a C-terminal region containing a basic region, and an acidic region of a SSX protein, optionally wherein the basic region comprises a minimal 34-amino acid region. In another embodiment, the SS18-SSX fusion protein is selected from Table 2. In still another embodiment, the agent inhibits binding of the basic region of the SS18-SSX fusion protein to an acidic patch of the nucleosome, optionally wherein the nucleosome is an H2A K119Ub-marked nucleosome. In yet another embodiment, the agent is a small molecule inhibitor, a small molecule degrader, CRISPR guide RNA (gRNA), RNA interfering agent, oligonucleotide, peptide or peptidomimetic inhibitor, aptamer, antibody, or intrabody. In another embodiment, the RNA interfering agent is a small interfering RNA (siRNA), CRISPR RNA (crRNA), CRISPR guide RNA (gRNA), a small hairpin RNA (shRNA), a microRNA (miRNA), or a piwi-interacting RNA (piRNA). In still another embodiment, the agent comprises an antibody and/or intrabody, or an antigen binding fragment thereof, which specifically binds to the SS18-SSX fusion protein, the SSX tail, and/or the H2AK119Ub-marked nucleosome, optionally wherein the SSX tail is SSX tail (34 amino acid) and/or SSX tail (78 amino acid). In yet another embodiment, the agent comprises an antibody and/or intrabody, or an antigen binding fragment thereof, which specifically binds to at least one of the following regions: (1) the basic region of the SS18-SSX fusion protein; (2) the acidic region of the SS18-SSX fusion protein; (3) the acidic patch of the H2AK119Ub-marked nucleosome; and/or (4) the H2AK119Ub mark. In another embodiment, the antibody and/or intrabody, or antigen binding fragment thereof, is chimeric, humanized, composite, or human. In still another embodiment, the antibody and/or intrabody, or antigen binding fragment thereof, comprises an effector domain, comprises an Fc domain, and/or is selected from the group consisting of Fv, Fav, F(ab′)2, Fab′, dsFv, scFv, sc(Fv)2, and diabodies fragments. In yet another embodiment, the agent induces deletion or mutation of the basic region of the SS18-SSX fusion protein, the acidic region of the SS18-SSX fusion protein, the acidic patch of the H2AK119Ub-marked nucleosome, and/or a region within the SSX tail (34 amino acid). In another embodiment, the agent inhibits H2A ubiquitination. In still another embodiment, the agent inhibits ubiquitin ligase activity of a PRC1 complex. In yet another embodiment, the agent reduces expression, copy number, and/or ubiquitin ligase activity of RING1A and/or RING1B. In another embodiment, the agent inhibits recruitment of a SS18-SSX fusion protein-bound BAF complex to an H2AK119Ub-marked nucleosome. In still another embodiment, the agent inhibits activation of at least one oncogenic target gene of the SS18-SSX fusion protein. In yet another embodiment, the oncogenic target gene of the SS18-SSX fusion protein is selected from the group consisting of WNT16 and oncogenic target genes listed in McBride et al. (2018) Cancer Cell 33:1128-1141. In another embodiment, the agent reduces the number of viable or proliferating cells in the cancer, and/or reduces the volume or size of a tumor comprising the cancer cells. In still another embodiment, the method further comprises administering to the subject an immunotherapy and/or cancer therapy, optionally wherein the immunotherapy and/or cancer therapy is administered before, after, or concurrently with the agent. In yet another embodiment, the immunotherapy is cell-based. In another embodiment, the immunotherapy comprises a cancer vaccine and/or virus. In still another embodiment, the immunotherapy inhibits an immune checkpoint, such as an immune checkpoint selected from the group consisting of CTLA-4, PD-1, VISTA, B7-H2, B7-H3, PD-L1, B7-H4, B7-H6, ICOS, HVEM, PD-L2, CD160, gp49B, PIR-B, KIR family receptors, TIM-1, TIM-3, TIM-4, LAG-3, GITR, 4-IBB, OX-40, BTLA, SIRPalpha (CD47), CD48, 2B4 (CD244), B7.1, B7.2, ILT-2, ILT-4, TIGIT, HHLA2, butyrophilins, and A2aR. In yet another embodiment, the cancer therapy is selected from the group consisting of radiation, a radiosensitizer, and a chemotherapy. In another embodiment, the method further comprises administering to the subject at least one additional therapeutic agent or regimen for treating the cancer.

[0010] In another aspect, a method of reducing viability or proliferation of synovial sarcoma cells comprising contacting the synovial sarcoma cells with an agent that inhibits binding of a SS18-SSX fusion protein to a nucleosome, optionally wherein the nucleosome is an H2AK119Ub-marked nucleosome, is provided.

[0011] As described above, numerous embodiments are further provided that can be applied to any aspect of the present invention and/or combined with any other embodiment described herein. For example, in one embodiment, the SS18-SSX fusion protein comprises a C-terminal region containing a basic region, and an acidic region of a SSX protein, optionally wherein the basic region comprises a minimal 34-amino acid region. In another embodiment, the SS18-SSX fusion protein is selected from Table 2. In still another embodiment, the agent inhibits binding of the basic region of the SS18-SSX fusion protein to an acidic patch of the H2AK119Ub-marked nucleosome. In yet another embodiment, the agent is a small molecule inhibitor, a small molecule degrader, CRISPR guide RNA (gRNA), RNA interfering agent, oligonucleotide, peptide or peptidomimetic inhibitor, aptamer, antibody, or intrabody. In another embodiment, the RNA interfering agent is a small interfering RNA (siRNA), CRISPR RNA (crRNA), CRISPR guide RNA (gRNA), a small hairpin RNA (shRNA), a microRNA (miRNA), or a piwi-interacting RNA (piRNA). In still another embodiment, the agent comprises an antibody and/or intrabody, or an antigen binding fragment thereof, which specifically binds to the SS18-SSX fusion protein, or the H2AK119Ub-marked nucleosome. In yet another embodiment, the agent comprises an antibody and/or intrabody, or an antigen binding fragment thereof, which specifically binds to at least one of the following regions: (1) the basic region of the SS18-SSX fusion protein; (2) the acidic region of the SS18-SSX fusion protein; (3) the acidic patch of the H2AK119Ub-marked nucleosome; and/or (4) the H2AK119Ub mark. In another embodiment, the antibody and/or intrabody, or antigen binding fragment thereof, is chimeric, humanized, composite, or human. In still another embodiment, the antibody and/or intrabody, or antigen binding fragment thereof, comprises an effector domain, comprises an Fc domain, and/or is selected from the group consisting of Fv, Fav, F(ab′)2, Fab′, dsFv, scFv, sc(Fv)2, and diabodies fragments. In yet another embodiment, the agent induces deletion or mutation of the basic region of the SS18-SSX fusion protein, the acidic region of the SS18-SSX fusion protein, and/or the acidic patch of the H2AK119Ub-marked nucleosome. In another embodiment, the agent inhibits H2A ubiquitination. In still another embodiment, the agent inhibits ubiquitin ligase activity of a PRC1 complex. In yet another embodiment, the agent reduces expression, copy number, and/or ubiquitin ligase activity of RING1A and/or RING1B. In another embodiment, the agent inhibits recruitment of a SS18-SSX fusion protein-bound BAF complex to an H2AK119Ub-marked nucleosome. In still another embodiment, the agent inhibits activation of at least one oncogenic target gene of the SS18-SSX fusion protein. In yet another embodiment, the oncogenic target gene of the SS18-SSX fusion protein is selected from the group consisting of WNT16 and oncogenic target genes listed in McBride et al. (2018) Cancer Cell 33:1128-1141. In another embodiment, the method further comprises contacting the cancer cells with an immunotherapy and/or cancer therapy, optionally wherein the immunotherapy and/or cancer therapy is administered before, after, or concurrently with the agent. In still another embodiment, the immunotherapy is cell-based. In yet another embodiment, the immunotherapy comprises a cancer vaccine and/or virus. In another embodiment, the immunotherapy inhibits an immune checkpoint, such as an immune checkpoint selected from the group consisting of CTLA-4, PD-1, VISTA, B7-H2, B7-H3, PD-L1, B7-H4, B7-H6, ICOS, HVEM, PD-L2, CD160, gp49B, PIR-B, KIR family receptors, TIM-1, TIM-3, TIM-4, LAG-3, GITR, 4-IBB, OX-40, BTLA, SIRPalpha (CD47), CD48, 2B4 (CD244), B7.1, B7.2, ILT-2, ILT-4, TIGIT, HHLA2, butyrophilins, and A2aR. In still another embodiment, the cancer therapy is selected from the group consisting of radiation, a radiosensitizer, and a chemotherapy.

[0012] In still another aspect, a method of assessing the efficacy of an agent for treating synovial sarcoma in a subject, comprising: a) detecting in a subject sample at a first point in time the number of viable and/or proliferating cancer cells; b) repeating step a) during at least one subsequent point in time after administration of the agent; and c) comparing number of viable and/or proliferating cancer cells detected in steps a) and b), wherein the absence of, or a significant decrease in number of viable and/or proliferating cancer cells in the subsequent sample as compared to the amount in the sample at the first point in time, indicates that the agent treats synovial sarcoma in the subject, is provided.

[0013] As described above, numerous embodiments are further provided that can be applied to any aspect of the present invention and/or combined with any other embodiment described herein. For example, in one embodiment, the subject has undergone treatment, completed treatment, and/or is in remission for synovial sarcoma between the first point in time and the subsequent point in time. In another embodiment, the first and/or at least one subsequent sample is selected from the group consisting of ex vivo and in vivo samples. In still another embodiment, the first and/or at least one subsequent sample is obtained from an animal model of synovial sarcoma. In yet another embodiment, the first and/or at least one subsequent sample is a portion of a single sample or pooled samples obtained from the subject. In another embodiment, the sample comprises cells, serum, peritumoral tissue, and/or intratumoral tissue obtained from the subject. In still another embodiment, the method further comprises determining responsiveness to the agent by measuring at least one criteria selected from the group consisting of clinical benefit rate, survival until mortality, pathological complete response, semi-quantitative measures of pathologic response, clinical complete remission, clinical partial remission, clinical stable disease, recurrence-free survival, metastasis free survival, disease free survival, circulating tumor cell decrease, circulating marker response, and RECIST criteria. In yet another embodiment, the agent is administered in a pharmaceutically acceptable formulation. In another embodiment, the step of administering or contacting occurs in vivo, ex vivo, or in vitro.

[0014] In yet another aspect, a cell-based assay for screening for agents that reduce viability or proliferation of a synovial sarcoma cell comprising: a) contacting the synovial sarcoma cell with a test agent; and b) determining the ability of the test agent to inhibit binding of a SS18-SSX fusion protein, a SSX (78 amino acid) region, and/or a SSX (34 amino acid) minimal region to a nucleosome, optionally wherein the nucleosome is a H2AK119Ub-marked nucleosome, is provided.

[0015] As described above, numerous embodiments are further provided that can be applied to any aspect of the present invention and/or combined with any other embodiment described herein. For example, in one embodiment, the SS18-SSX fusion protein comprises a C-terminal region containing a basic region, and an acidic region of a SSX protein, optionally wherein the basic region comprises a minimal 34-amino acid regbion. In another embodiment, the SS18-SSX fusion protein is selected from Table 2. In still another embodiment, the step of contacting occurs in vivo, ex vivo, or in vitro. In yet another embodiment, the assay further comprising determining the ability of the test agent to inhibit recruitment of a SS18-SSX fusion protein-bound BAF complex to an H2AK119Ub-marked nucleosome and/or H2AK 119Ub-marked region of chromatin in cells, optionally wherein the cellular chromatin comprises a PRC1/H2A Ub domain. In another embodiment, the assay further comprises determining the ability of the test agent to inhibit activation of at least one oncogenic target gene of the SS18-SSX fusion protein. In still another embodiment, the oncogenic target gene of the SS18-SSX fusion protein is selected from the group consisting of WNT16 and oncogenic target genes listed in McBride et al. (2018) Cancer Cell 33:1128-1141. In yet another embodiment, the assay further comprises determining a reduction in the viability or proliferation of the cancer cells.

[0016] In another aspect, an in vitro assay for screening for agents that reduce viability or proliferation of a synovial sarcoma cell comprising: a) mixing a protein comprising a c-terminal basic region and a c-terminal acidic region of a SSX protein and a nucleosome together, optionally wherein the nucleosome is a H2AK119Ub-marked nucleosome; b) adding a test agent to the mixture; and c) determining the ability of the test agent to decrease binding of the protein to the nucleosome, is provided.

[0017] As described above, numerous embodiments are further provided that can be applied to any aspect of the present invention and/or combined with any other embodiment described herein. For example, in one embodiment, the protein comprises c-terminal 34 amino acids (aa155-188) of a SSX protein. In another embodiment, the protein comprises c-terminal 78 amino acids (aa 111-188) of a SSX protein. In still another embodiment, the protein is a SS18-SSX fusion protein. In yet another embodiment, the SS18-SSX fusion protein is selected from Table 2. In another embodiment, the SS18-SSX fusion protein comprises SS18 protein fused with a c-terminal portion of a SSX protein. In still another embodiment, the SS18-SSX fusion protein comprises c-terminal 34 amino acids (aa155-188) of a SSX protein. In yet another embodiment, the SS18-SSX fusion protein comprises c-terminal 78 amino acids (aa 111-188) of a SSX protein. In another embodiment, the SSX protein is selected form the group consisting of human SSX1, SSX2, SSX3, SSX4, SSX6, SSX7, SSX8, and SSX9. In still another embodiment, the SS18-SSX fusion protein comprises W164, R167, L168, R169 and/or R171 of SEQ ID: 3, 7, 13, 17, 21, 25, or 31, or orthologs thereof. In yet another embodiment, the SS18-SSX fusion protein is a part of a BAF complex. In another embodiment, the nucleosome comprises H2A protein comprising E56, E64, D90, E91, E92 and/or E113 of human, mouse, rat, or Xenopus H2A, or orthologs thereof; and/or H2B protein comprising E105 and/or E113 of human, mouse, rat, or Xenopus H2B, or orthologs thereof. In still another embodiment, the subject is an animal model of the cancer, optionally wherein the animal model is a mouse model. In yet another embodiment, the subject is a mammal. In another embodiment, the mammal is a mouse or human. In still another embodiment, the mammal is a human.

[0018] In still another aspect, an isolated modified protein complex selected from the group consisting of protein complexes listed in Table 3, wherein the isolated modified protein complex comprises at least one subunit that is modified, is provided.

[0019] As described above, numerous embodiments are further provided that can be applied to any aspect of the present invention and/or combined with any other embodiment described herein. For example, in one embodiment, the at least one modified subunit is a fragment of the subunit. In another embodiment, the fragment of the subunit binds to at least one binding partner of the subunit to form the isolated modified protein complex. In still another embodiment, the fragment of the subunit comprises the basic region and/or the acidic region of a SSX protein. In yet another embodiment, the fragment of the subunit comprises c-terminal 34 amino acids (aa155-188) of a SSX protein. In another embodiment, the fragment of the subunit comprises c-terminal 78 amino acids (aa 111-188) of a SSX protein. In still another embodiment, the SSX protein is selected form the group consisting of human SSX1, SSX2, SSX3, SSX4, SSX6, SSX7, SSX8, and SSX9. In yet another embodiment, the fragment of the subunit comprises the acidic patch of a nucleosome and/or the H2A K119 Ub mark. In another embodiment, at least one subunit is linked to at least another subunit. In still another embodiment, at least one subunit is linked to at least another subunit through covalent cross-links. In yet another embodiment, at least one subunit is linked to at least another subunit through a peptide linker. In another embodiment, the at least one subunit comprises a heterologous amino acid sequence. In still another embodiment, the heterologous amino acid sequence comprises an affinity tag or a label. In yet another embodiment, the affinity tag is selected from the group consisting of Glutathione-S-Transferase (GST), calmodulin binding protein (CBP), protein C tag, Myc tag, HaloTag, HA tag, Flag tag, His tag, biotin tag, and V5 tag. In yet another embodiment, the label is a fluorescent protein. In another embodiment, the at least one subunit is selected from the group consisting of HA-SS18-SSX1, V5-SS18-SSX1, V5-SS18-SSX1 34aa tail, V5-SS18-SSX1 78aa tail, H2A, and H2B.

[0020] In yet another aspect, a pharmaceutical composition comprising an isolated modified protein complex described herein, and a carrier, is provided.

### BRIEF DESCRIPTION OF THE DRAWINGS

[0021] FIG. 1A-FIG. 1E show that SS18-SSX-containing BAF complexes exhibit significantly increased affinity for chromatin. FIG. 1A shows colloidal blue staining performed on purifications of wild-type BAF complexes (from HA-SS18 WT-expressing 293T cells) and SS18-SSX-containing BAF complexes (from HA-SS18-SSX1-expressing cells), from soluble nuclear extract (NE) and chromatin-bound (CHR) fractions. Equal amounts (by volume) of nuclei in each condition were isolated and subsequently purified in to NE and CHR fractions. FIG. 1B shows MS spectral counts for BAF complex subunits (green) and histone proteins (orange) from HA-SS18 WT and HA-SS18-SSX purifications from NE and CHR fractions in (FIG. 1A). Peptides counts are log 2 normalized to bait (SS18 peptides). FIG. 1C shows density sedimentation gradients using 10-30% glycerol performed on HA-SS18 WT and HA-SS18-SSX1 purifications from HEK-293T cells. BAF complex subunits and histone proteins are indicated. SYPRO® Ruby staining was used for visualization. FIG. 1D shows immunoblot for SMARCA4 and SMARCC1 performed on Aska SS cells in shCtrl (control, non-targeting harpin shRNA) and shSSX (shRNA targeted to SSX) conditions following differential salt extraction (0-1000 mM NaCl). FIG. 1E shows FRAP studies performed on HEK293T cells expressing either GFP-SS18 WT or GFP-SS18-SSX1. Recovery kinetics were recorded and the recovery half-times were calculated to be 10.1 and 33.9 seconds for GFP-SS18 WT and GFP-SS18-SSX1, respectively (values represent mean of n=30 cells per condition, with error bars indicating standard deviation at each time point).

[0022] FIG. 2A-FIG. 2H show that SS18-SSX-containing BAF complexes exhibit high-affinity interactions with histones and longer residency times on chromatin. FIG. 2A shows MS spectral counts for BAF complex subunits and histone proteins from HA-SS18 WT and HA-SS18-SSX purifications from soluble nuclear extract NE and CHR fractions from FIG. 1A. Total number of peptides (number of peptides normalized to bait, SS18) are shown. FIG. 2B shows ranked peptides captured in HA-SS18-SSX purification (chromatin-bound fraction). Red indicates mSWI/SNF complex subunits. Green indicates histones. Orange indicates members of PRC1 and PRC2 complexes, shown for comparison. See also Tables 5A-5E. FIG. 2C has two panels. The top panel shows immunoblot for GFP and H2A performed on HEK-293T cells infected with either GFP-SS18 WT or GFP-SS18-SSX following differential salt extraction (0-1000 mM NaCl). The bottom panel shows immunoblot for SS18 and H2A K119Ub performed on HEK-293T cells (naive) and Aska-SS cells following differential salt extraction (0-1000 mM NaCl) experiments. FIG. 2D shows immunoblot for SMARCA4 and SS18 performed HEK-293T cells or Aska SS cells (SS18-SSX+) following differential salt extraction (0-1000 mM NaCl). FIG. 2E shows FRAP experiments performed in the Aska SS cell line modified to express BRG1 (SMARCA4)-Halo. Aska-SS cells were treated with either shControl shRNA hairpin or shSSX (targeting the SS18-SSX fusion). Recovery t½ times (seconds) with 95% CIs are shown; n=20 cells. FIG. 2F shows SYPRO® Ruby staining indicating identified proteins from FIG. 1c in Fraction 13 (HA-SS18 WT) and Fraction 18 (HA-SS18-SSX). FIG. 2G shows SMARCB1 peptide abundance (normalized to SMARCA4) and relative to SS18 WT-bound complexes (soluble NE fraction). NE indicates nuclear extract; CHR indicates chromatin-bound fraction. FIG. 2H has two panesl. The left panel shows cyber-gold staining of complexes purified from untreated (no benzonase) nuclear extracts isolated via ammonium sulfate extraction. The right panel shows that H3 immunoblot reveals prominent histone binding in HA-SS18-SSX-bound complexes but not in HA-SS18 WT-bound complexes.

[0023] FIG. 3A-FIG. 3I show that conserved basic and acidic regions within a minimal SSX domain are necessary and sufficient to bind nucleosomes and promote specialized BAF complex chromatin recruitment and activity. FIG. 3A shows GST (control) and GST-SSX1 (78aa) purified recombinant proteins incubated with mammalian mononucleosomes (purified by MNase digestion), captured using glutathione resin, visualized using colloidal blue. FIG. 3B shows quantitative targeted MS analysis of MBP pull down experiments using the MBP-SSX 78aa protein and endogenous mammalian nucleosomes purified using MNase digestion from 293T cells. Log 2 (FC) calculated relative to input sample. Red indicates enriched; blue indicates depleted. FIG. 3C shows immunofluorescence analysis of V5-tagged SS18 and SS18-SSX relative to RING1B and SUZ12 in 293T cells. Arrows indicate positions of the Barr bodies (inactive X). Scale bar indicates 5 μm. FIG. 3D shows alignment of SSX1 protein across species and relative to related PRDM7/9 proteins. Highly conserved basic and acidic regions are indicated in blue and red, respectively. FIG. 3D discloses SEQ ID NOS 231-233, 233-236, 232, 237, 232 and 238-243, respectively, in order of appearance. FIG. 3E shows pull-down experiments of N-terminally biotinylated SSX peptides (scrambled (aa155-188), SSX 34aa (aa155-188), SSX 24aa (aa164-188) and SSX 23aa (aa165-188) incubated with mammalian mononucleosomes and visualized with colloidal blue. FIG. 3F shows pull-down experiments of N-terminally biotinylated SSX peptides including scrambled control, wildtype (WT) and mutant variants (single alanine substitutions as well as regional substitutions (i.e., Basic/A, basic region RLRERK-->AAAAAA (SEQ ID NOS 219-220, respectively, in order of appearance); Acidic/A, acidic region DPEEDDE-->AAAAAAA (SEQ ID NOS 221-222, respectively, in order of appearance)) incubated with mammalian mononucleosomes and visualized with colloidal blue. FIG. 3F discloses SEQ ID NO: 232. FIG. 3G shows ChIP-seq density heatmaps reflecting chromatin occupancy of V5-SS18-SSX1, V5-SS18, V5-SS18-SSX (24aa) and V5-SS18-SSX (34aa) over all V5 Peaks (38,014 total peaks). FIG. 3H shows heatmap reflecting top 5% upregulated and downregulated genes (Z-score) by RNA-seq for each condition. FIG. 3I shows proliferation experiments performed on SYO-1 SS cells infected with either control hairpin (shCt) or shSSX (knockdown of endogenous SS18-SSX) with overexpression of empty vector control, SS18-SSX 78aa or SS18-SSX 34aa variants. n=3 independent experimental replicates; error bars represent standard deviation; ** indicate p<0.01.

[0024] FIG. 4A-FIG. 4H show the SSX 78aa protein binds mononucleosomes, with preference for nucleosomes decorated with repressive histone modifications. FIG. 4A shows coomassie-stained gel of recombinantly purified GST, GST-SSX (78aa) proteins, run next to BSA protein as control. FIG. 4B shows purification of mammalian mononucleosomes from HEK-293T cells using MNase digestion. FIG. 4C shows incubation of GST or GST-SSX (78aa) with either recombinant or mammalian mononucleosomes, resolved by immunoblot for GST and histone H3 or Coomassie and histone H3. Two representative experiments are shown. FIG. 4D shows purification of MBP and MBP-SSX (78aa) proteins for targeted, quantitative histone mass-spectrometry. Quantitative histone mass spectrometry performed on MBP-SSX1 (versus MBP control) incubated with pooled mononucleosomes isolated from HEK-293T cells via MNase digestion. Experiment performed in n=2 replicates. See also Tables 3A-3C. FIG. 4E shows a schematic diagram for targeted MS experiments. FIG. 4F shows enrichment of SSX-bound histone peptides, over input. Enriched and depleted proteins are shown in red and blue, respectively. FIG. 4G shows quantitative densitometry normalized to input reflecting GST-SSX 78aa preferential binding to mammalian mononucleosomes (prepared via MNase digestion in HEK-293T cells) versus recombinant, unmodified nucleosomes. Bars represent averages of n=3 independent experiments, error bars represent standard deviation; p-value=0.0164. FIG. 4H shows heatmap reflecting enrichment or depletion of selected histone marks, including H2AZ and H3K4 methylation states. Scale=log 2FC.

[0025] FIG. 5A-FIG. 5G show nucleosome binding and nuclear localization properties of SS18-SSX and SSX variants. FIG. 5A shows immunofluorescence imaging performed on IMR90 fibroblasts and HEK293T cells infected with either V5-SS18-SSX or V5-SS18. Visualized in red for H3K9me3, SMARCA4, PBRM1, SMARCC1, H3K9Ac across experiments. DAPI is shown as nuclear stain and merged images are provided with scale bars; Scale bar indicates 5 μm. FIG. 5B shows IF-based localization of SS18 FL (1-188aa) in fibroblasts. H2AUb119, DAPI counterstain, and merged images are shown. Scale bar indicates 5 μm. FIG. 5C shows peptide competition experiment using Biotinylated SSX peptide (aa 155-188) and unlabeled SSX (aa 155-188). Visualization for Histone H3 uses immunoblot. FIG. 5D shows SSX peptide hybridization experiments performed on methanol-fixed cells. Streptavidin (SA) used for biotinylated SSX peptide visualization, H2AUb119 for Barr bodies. DAPI counterstain and merged images shown. Scale bar indicates 5 μm. FIG. 5E has two panels. The top panel shows conservation analysis among SSX and PRDM 7/9 human protein regions. The bottom panel shows peptide pull down experiments with recombinant nucleosomes performed with Scrambled control SSX1, SSX1, PRDM7, PRDM9. Visualization is by colloidal blue staining. FIG. 5E discloses SEQ ID NOS 232-233, 236-237, 244 and 224, respectively, in order of appearance. FIG. 5F has two panels. The left panel shows alignment of SSX proteins (SSX 1-9). The right panel shows peptide pull down experiments with recombinant nucleosomes performed with aa 155-188 of SSX family members. Visualization is by colloidal blue staining. FIG. 5F discloses SEQ ID NOS 232, 232, 232-233 and 233-237, respectively, in order of appearance. FIG. 5G shows peptide competition experiment using Biotinylated SSX peptide (aa 155-188) and Scrambled control SSX peptide (aa 155-188). Visualization for Histone H3 is by immunoblot.

[0026] FIG. 6A-FIG. 6E show defining a minimal 34-aa SSX region responsible for chromatin engagement and oncogenic gene expression. FIG. 6A shows additional representative V5 ChIP-seq and RNA-seq tracks, here shown at the SOX2 and GALNT9 loci. FIG. 6B shows differential salt experiments ([0-1000 mM NaCl]) performed on HEK-293T cells infected with either SS18-SSX 34aa versus SS18-SSX 24aa. Immunoblots for V5 as well as GAPDH and H3 (controls) are shown. FIG. 6C shows immunofluoroscence imaging of IMR90 fibroblasts infected with SS18 and SS18-SSX variants, as indicated, and stained for V5 (SS18-SSX or SSX variant) and DAPI; merged images are shown. Localization to H2AUb119-high sites (Barr bodies) is highlighted. Scale bar indicates 5 μm. FIG. 6D shows beta-gal senescence assay performed on IMR90 cells infected with WT SS18, SS18-SSX and SSX FL and 78aa variants, as indicated. FIG. 6E shows that SYO-1 synovial sarcoma cells were treated with either shCtrl (control hairpin) or shSSX (shRNA targeting SSX) to reduce levels of endogenous fusion, followed by rescue of SS18-SSX WT and mutant variants or empty vector control. Proliferation was evaluated over 16 days (see also FIG. 3I).

[0027] FIG. 7A-FIG. 7J show that the SSX basic region outcompetes the SMARCB1 C-terminal alpha-helical domain for nucleosome acidic patch binding. FIG. 7A shows incubation of biotinylated SSX peptides (aa 155-188) in either WT or RLR motif-mutant forms (R167A, R169A, R171A) with nucleosomes. FIG. 7B shows photocrosslinking experiments performed with reactive diazarine probes localized throughout the nucleosome acidic patch region indicate strongest binding to H2A E56 and 12B E113 residues. FIG. 7C shows SSX binding sites mapped on nucleosome PDB: 1KX5. Acidic patch crosslinked sites are labeled. FIG. 7D shows incubation of GST-SSX 78aa tail with either WT or acidic patch mutant nucleosomes (D90N, E92K, and E113K). Visualization of binding is by histone H3 immunoblot. FIG. 7E shows LANA peptide competition experiment with SSX 34aa biotinylated peptide bound to nucleosomes. FIG. 7F shows TALOS secondary structure prediction of the SSX 78aa region. An alpha helical probability (aa HAWTHRLRERK (SEQ ID NO: 223)) is indicated in red. The protein is largely disordered with a short helical--like segment (aa164-171) and a beta-strand like segment (aa174-179). FIG. 7F discloses SEQ ID NO: 232. FIG. 7G shows V5 ChIP-seg heat map reflecting genome-wide localization of V5-tagged SS18-SSX, SS18 WT and SS18-SSX RLR-->RLA (RI69A) mutant in CRL7250 fibroblasts. FIG. 7H shows reciprocal competition experiments performed with either SMARCB1 C-terminal alpha helical domain bound to nucleosomes or SSX 34aa bound to nucleosomes and competed with indicated peptide. FIG. 7I shows REAA nucleosome remodeling assay performed with BAF complexes containing either WT SS18 or SS18-SSX. Experiment performed at 37 degrees C., 0-40 min time course, BAF complex capture performed using ARDD1A IP. FIG. 7J shows ATAC-seq DNA accessibility (log 2FC(RPKM+1) performed in CRL7250 fibroblasts over SS18-SSX-specific sites and SS18 WT/SS18-SSX shared sites, defined in FIG. 7G.

[0028] FIG. 8A-FIG. 8G show that the SSX basic region and SMARCB1 C-terminal alpha helical domain compete for nucleosome acidic patch binding. FIG. 8A shows strategy for nucleosome-peptide photocrosslinking. FIG. 8B shows additional (replicate) photocrosslinking experiments performed with reactive diazarine probes localized throughout the nucleosome acidic patch region indicate strongest binding to H2A E56 and H2B E113 residues, weaker binding to H2A E91, and no binding to E61, E92, and D90 residues. Experimental conditions are as follows: 0.3 μM mononucleosomes, 3 μM SSX, 150 mM KCl. FIG. 8C shows pulldown experiments performed with either Scrambled or SSX 34aa peptides (biotinylated) incubated with mammalian mononucleosomes prepared from cells infected with WT H2A, or H2AD90N, H2A E92K mutant variants. FIG. 8D shows 15N-HSQC spectrum of SSX1 mutant having 7 C-terminal residue deletion, with assignments marked in red. The data were collected using 330 IM protein in pH 6.5 buffer at 15° C. on a 700 MHz spectrometer. FIG. 8E shows a model indicating docking of solved LANA peptide-nucleosome binding region and SSX peptide crosslinking in the nucleosome acidic patch. Interacting residues from photocrosslinking are highlighted. FIG. 8F shows modeling of SSX C-term (34aa) alpha helical peptide on nucleosome structure (PDB: 1KX5) using ZDOCK, in full nucleosome and zoomed-in view of acidic patch region. FIG. 8G shows photocrosslinking experiments performed with SSX 34aa peptide incubated with nucleosomes modified at the H2A E56 residue, with and without LANA peptide competition.

[0029] FIG. 9A-FIG. 9G show that mutations in the basic region of SSX affect the targeting and function of SS18-SSX-containing BAF complexes. FIG. 9A shows gene expression changes across each SS18 WT and SS18-SSX variant conditions from FIG. 7G. FIG. 9B shows proliferative rescue experiments performed in SYO-1 SS cell line treated with shSSX and rescued with either vector control, SS18-SSX or SS18-SSX (R169A or W164A) variants. n=3 independent experiments performed; error bars represent standard deviation; * indicates p<0.05. FIG. 9C shows peptide hybridization of IMR90 cells using SSX and mutant basic region mutant peptides. Arrows indicate positions of the Barr bodies. Scale bar indicates 5 μm. FIG. 9C discloses SEQ ID NOS 221-222, respectively, in order of appearance. FIG. 9D shows immunoblot performed on whole-cell extracts (RIPA extraction) from SYO1 cells treated with either shCtrl or shSSX and infected with either empty vector or SS18-SSX variants, used in proliferation experiments in FIG. 9B. FIG. 9E shows peptide hybridization of IMR90 cells using SSX and mutant basic region mutant (W164A and R169A) peptides. Arrows indicate positions of the Barr bodies. Scale bar indicates 5 μm. FIG. 9F shows ChIP-seq studies (anti-V5) performed in CRL7250 cells infected with either SS18-SSX or SS18-SSX W164A mutant, mapped as summary plot over SS18-SSX target sites. FIG. 9G shows RNA-seq (gene expression) data, box and whisker plots indicating average expression in SS18-SSX versus SS18-SSX W164A mutant conditions.

[0030] FIG. 10A-FIG. 10G show subunit composition, chromatin binding, and functional properties of SS18-SSX-bound BAF complexes. FIG. 10A shows SMARCB1 peptide abundance calculated from MS experiments (anti-SMARCA4 (BRG1) IPs) performed in Aska-SS synovial sarcoma cells, human Fibroblasts, and HEK-293T cells. Peptide abundance normalized to SMARCA4 abundance. FIG. 10B shows input and GFP IPs performed in Aska-SS cells infected with either GFP-SS18 or GFP-SS18-SSX. SMARCC1, SS18, GFP, SMARCB1, and TBP levels are shown. FIG. 10C shows SS18-SMARCA4 crosslinks detected in CX-MS experiments of intact, fully-formed BAF complexes in (Mashtalir et al. (2018) Cell 175:1272-1288). FIG. 10D shows immunoblot studies performed on CRL7250 cells infected with SS18-SSX variants indicated. FIG. 10E shows the immunoblot performed for ARID1A and SS18 on complexes captured via ARID1A, used for nucleosome remodeling and ATPase assays. FIG. 10F shows ATAC-seq experiments performed in SYO-1 SS cells in shCtrl and shSSX conditions, mapped over SS18 ChIP-seq. FIG. 10G shows ATPase activity calculated by ADP-Glo for SS18 WT- and SS18-SSX-containing BAF complexes. T indicates 0-40 min timecourse; n=3 experimental replicates at each time point; error bars represent standard deviation.

[0031] FIG. 11A-FIG. 11K show that SSX preferentially binds H2A K119Ub-marked nucleosomes to promote BAF complex targeting to polycomb-repressed loci. FIG. 11A shows CERES dependency scores (fitness dropout) derived from genome-scale fitness screens performed using CRISPR-Cas9-based methods (Achilles, Broad Institute; available on the World Wide Web at depmap.org/portal/achilles/). Difference is the score calculated between SYO1 (SS18-SSX+) cells and SW982 cells (negative for fusion, histologic mimic). mSWI/SNF, PRC1, PRC2 members are shown. FIG. 11B shows SS18 localization (by ChIP-seq) in SYO-1 cells treated with either scrambled KD or shSS18-SSX, aligned with H2AUb119 ChIP-seq in the scrambled KD condition. FIG. 11C shows example tracks at the SLIT3 locus reflecting co-localization of SS18-SSX BAF complexes, H2AUb, and RING1B (PRC1). FIG. 11D shows GST-SSX pull down experiments performed using either WT nucleosomes or H2A K119Ub nucleosomes. H3 immunoblot is used for assessment of nucleosome binding to GST-SSX. FIG. 11E shows alphalisa experiment performed with GST-SSX and 10 nM biotinylated nucleosomes of either WT, H2AUb or H2BUb nucleosomes. EC50 measurements are shown. n=3 experiments. FIG. 11F shows pull down experiments using endogenous, fully-assembled HA-SS18- or HA-SS18-SSX-bound BAF complexes incubated with either WT nucleosomes (unmodified) or H2A K119Ub-modified nucleosomes. SMARCA4 and H3 immunoblots are shown. FIG. 11G has two panels. The left panel shows the representation of PRC1 complex-nucleosome structure (McGinty et al. 2018; PDB: 4R8P), indicating regions mutagenized. The right panel shows the immunoblot of representative mutations which inhibit H2A K119Ub deposition absent changes to PRC1 structural integrity. FIG. 11H shows immunofluorescence imaging for RING1B (red), V5 SS18-SSX (green), with DAPI nuclear stain, and merged images in WT and RING1A/B dKO 293T cells with rescued conditions as indicated. FIG. 11I shows quantification of Barr body (inactive X Chr) localization for each condition, meanAU is plotted. Peptides were incubated −/+presence of USP2 treatment. Error bars=st.dev. FIG. 11J shows pull down experiments performed using either GST-SSX or GST-SSXdel7aa (acidic C-term DPEEDDE-->AAAAAAA (SEQ ID NOS 221-222, respectively, in order of appearance)) with WT nucleosomes or H2A K119Ub nucleosomes. H3 immunoblot is used for assessment of nucleosome binding to GST-SSX. FIG. 11K shows an alphalisa experiment performed with GST-SSX or GST-SSXdel7aa (acidic C-term) and 10 nM biotinylated nucleosomes of either WT or H2AUb nucleosomes. EC50 measurements are shown. n=3 experiments; error bars=st.dev. Data for GST-SSX with WT nucleosomes and H2A K119Ub nucleosomes are shared between FIG. 11E.

[0032] FIG. 12A-FIG. 12L show that SS18-SSX-bound BAF complexes preferentially bind H2A K119Ub-marked nucleosomes. FIG. 12A shows waterfall dependency plots for RING1B, PCGF3, PCGF5 and KDM2B genes across n=387 cell lines (Project DRIVE Dataset; available on the World Wide Web at oncologynibr.shinyapps.io/drive/; Novartis). SS cell lines containing the SS18-SSX fusion oncoprotein are highlighted in red. FIG. 12B shows H2A K119Ub and RING1B ChIP-seq tracks over selected loci, aligned with SS18 (BAF) localization in SYO-1 cells treated with shScramble or shSS18-SSX. FIG. 12C shows MBP-SSX1 (78aa) pull down experiments which indicate capture of histones, and specifically, H2AUb species. FIG. 12D shows CERES dependency scores (fitness dropout) derived from genome-scale fitness screens performed using CRISPR-Cas9-based methods (Achilles, Broad Institute; available on the World Wide Web at depmap.org/portal/achilles/). Difference is the score calculated between SYO1, Yamato-SS, SCS241 (SS18-SSX+) cells and SW982 cells (negative for fusion, histologic mimic). Blue indicates enriched for dependency. mSWI/SNF, PRC1, PRC2 members are shown. FIG. 12E shows CERES and DEMETER Dependency scores for SSX1 and SS18 genes for CRISPR-Cas9 and RNAi datasets, respectively. Synovial sarcoma cell lines are indicated in pink; all other cell lines are represented in gray. FIG. 12F shows CERES and DEMETER Dependency scores for SSX1 and SS18 genes for CRISPR-Cas9 and RNAi datasets, respectively. Synovial sarcoma and soft tissue (SS cell lines) exhibit preferential dependency. (Project DRIVE; available on the World Wide Web at oncologynibr.shinyapps.io/drive/). SS cell lines containing the SS18-SSX fusion oncoprotein are highlighted in red. FIG. 12 G shows GST-SSX pull down experiments performed using either WT nucleosomes or H2A K119Ub nucleosomes. H3 immunoblot is used for assessment of nucleosome binding to GST-SSX. FIG. 12H shows streptavidin-based pull-down experiments using endogenous, fully-assembled HA-SS18- or HA-SS18-SSX-bound BAF complexes incubated with biotinylated WT nucleosomes (unmodified) or H2A K119Ub-modified nucleosomes. SMARCA4 and H3 immunoblots are shown. FIG. 12I shows that silver stain of the WT SS18 complexes and SS18-SSX fusion complexes isolated usin ammonium sulfate nuclear extraction protocol. Identified proteins labeled (Left). WB of the samples on the right indicating presence of histone H3 (Right). FIG. 12J shows pull down experiments performed using GST-SSX incubated with unmodified or a series of modified recombinant mononucleosomes, or endogenous mononucleosomes (mammalian, purified via MNase digestion from HEK-239T cells). FIG. 12K shows quantitative densitometry performed on experiment in FIG. 6D. FIG. 12L shows fluorescence polarization assays performed with fluorescently-labeled SSX1 (78aa) and either unmodified nucleosomes (blue curve) or H2A K119Ub-modified nucleosomes (red curve).

[0033] FIG. 13A-FIG. 13G show that SSX targeting requires PRC1 complex-mediated H2A K119Ub placement. FIG. 13A shows immunoblots performed on V5 IP and input protein levels in WT and RING1A/B double KO (dKO) HEK-293T cells. FIG. 13B shows an immunoblot of representative, structurally-guided RING1B mutations which inhibit H2AK119Ub deposition partially, fully, or not at all. FIG. 13C shows immunofluorescence imaging for RING1B (red), V5 SS18-SSX (green), with DAPI nuclear stain, and merged images. FIG. 13D shows peptide hybridization experiments. Representative images of SSX labeling of Barr bodies (inactive X) identified for each condition using H3K27me3 staining. Peptides (SSX or Scrambled) were incubated methanol-fixed cells, untreated or treated with USP2 deubiquitinating enzyme. FIG. 13E shows incubation of GST-SSX WT, SSX mutant variants, or UBQLN1-TUBE2 or hHR23A-TUBE1 (pos controls) with Ub-coated beads. FIG. 13F shows V5-SS18-SSX, H2A K119Ub, and H3K27me3 IF studies performed in WT and RING1A/B dKO 293T cells. FIG. 13G shows DMSO control or EZH2 inhibitor treatment (to inhibit H3K27me3 placement) indicates no change to SS18-SSX foci localized to Barr bodies.

[0034] FIG. 14A-FIG. 14B show a model for SS18-SSX-bound BAF complex nucleosome engagement. FIG. 14A shows a schematic of SS18 WT and the SS18-SSX fusion oncoprotein. FIG. 14B shows a model for BAF complex engagement on nucleosomes in WT and SS18-SSX fusion oncoprotein states. In WT complexes, the core module of BAF complexes engages the nucleosome acidic patch via the SMARCB1 C-terminal alpha helical domain (aa 351-385). Upon expression of SS18-SSX, the SSX alpha helical basic region (RLRERK (SEQ ID NO: 219)) dominantly engages the acidic patch, displacing SMARCB1, leading to its degradation, and changing the orientation of the BAF core module (Mashtalir et al. (2018) Cell 175:1272-1288) on the nucleosome. This SS18-SSX-specific conformation of BAF complexes exhibits strong preference for H2AUbK119-decorated nucleosomes, underpinning their preference for polycomb chromatin regions.

[0035] For any figure showing a bar histogram, curve, or other data associated with a legend, the bars, curve, or other data presented from left to right for each indication correspond directly and in order to the boxes from top to bottom of the legend.

### DETAILED DESCRIPTION OF THE INVENTION

[0036] The present invention is based, at least in part, on the discovery of the mechanism by which the SS18-SSX oncogenic fusion protein engages with chromatin and directs BAF chromatin remodeling complexes to specialized target sites. Specifically, it was found that SSX contains a basic region that directly binds the nucleosome acidic patch, altering BAF complex subunit configuration and activity. Further, SSX-nucleosome binding is augmented by the presence of ubiquitylated H2A (H2A K119Ub) on nucleosomes, preferential recognition of which requires a second, conserved region of SSX. These dual reader-like features of SSX underlie the highly disease-specific, hallmark chromatin remodeling complex targeting, gene expression, and functional dependencies in synovial sarcoma. Collectively, these studies reveal a novel mechanism of chromatin localization with important biological and disease implications.

[0037] There is current no direct way to treat human synovial sarcoma, driven by the SS18-SSX fusion oncoprotein. A major reason behind this is that, until this invention, little is known about how SS18-SSX specifically engages with chromatin to “hijack” BAF chromatin remodeling complexes to new sites genome-wide to activate cancer-promoting gene expression. The present disclosure unveils an unexpected, direct interaction between SSX and the nucleosome, specifically, the acidic patch region of the nucleosome, and the preference for repressed heterochromatin marked by the H2A K119Ub mark. Thus, the present disclosure provides an accurate and biologically meaningful screening strategy to identify agents that break SS18-SSX or SS18-SSX-containing BAF complex- H2A K119Ub nucleosome contacts. Chemical matter revealed from such a screening is capable of treating and potentially curing this disease in a highly specific manner.

[0038] Accordingly, the present invention relates, in part, to methods and agents for treating synovial sarcoma by modulating the interaction between SS18-SSX oncogenic fusion protein and H2A K119Ub nucleosomes.

### I. Definitions

[0039] The articles “a” and “an” are used herein to refer to one or to more than one (i.e. to at least one) of the grammatical object of the article. By way of example, “an element” means one element or more than one element.

[0040] The term “administering” is intended to include routes of administration which allow an agent to perform its intended function. Examples of routes of administration for treatment of a body which can be used include injection (subcutaneous, intravenous, parenterally, intraperitoneally, intrathecal, etc.), oral, inhalation, and transdermal routes. The injection can be bolus injections or can be continuous infusion. Depending on the route of administration, the agent can be coated with or disposed in a selected material to protect it from natural conditions which may detrimentally affect its ability to perform its intended function. The agent may be administered alone, or in conjunction with a pharmaceutically acceptable carrier. The agent also may be administered as a prodrug, which is converted to its active form in vivo.

[0041] The term “altered amount” or “altered level” refers to increased or decreased copy number (e.g., germline and/or somatic) of a biomarker nucleic acid, e.g., increased or decreased expression level in a cancer sample, as compared to the expression level or copy number of the biomarker nucleic acid in a control sample. The term “altered amount” of a biomarker also includes an increased or decreased protein level of a biomarker protein in a sample, e.g., a cancer sample, as compared to the corresponding protein level in a normal, control sample. Furthermore, an altered amount of a biomarker protein may be determined by detecting posttranslational modification such as methylation status of the marker, which may affect the expression or activity of the biomarker protein.

[0042] The amount of a biomarker in a subject is “significantly” higher or lower than the normal amount of the biomarker, if the amount of the biomarker is greater or less, respectively, than the normal level by an amount greater than the standard error of the assay employed to assess amount, and preferably at least 20%, 30%, 40%, 50%, 60%, 70%, 80%, 90%, 100%, 150%, 200%, 300%, 350%, 400%, 500%, 600%, 700%, 800%, 900%, 1000% or than that amount. Alternately, the amount of the biomarker in the subject can be considered “significantly” higher or lower than the normal amount if the amount is at least about two, and preferably at least about three, four, or five times, higher or lower, respectively, than the normal amount of the biomarker. Such “significance” can also be applied to any other measured parameter described herein, such as for expression, inhibition, cytotoxicity, cell growth, and the like.

[0043] The term “altered level of expression” of a biomarker refers to an expression level or copy number of the biomarker in a test sample, e.g., a sample derived from a patient suffering from cancer, that is greater or less than the standard error of the assay employed to assess expression or copy number, and is preferably at least twice, and more preferably three, four, five or ten or more times the expression level or copy number of the biomarker in a control sample (e.g., sample from a healthy subjects not having the associated disease) and preferably, the average expression level or copy number of the biomarker in several control samples. The altered level of expression is greater or less than the standard error of the assay employed to assess expression or copy number, and is preferably at least 20%, 30%, 40%, 50%, 60%, 70%, 80%, 90%, 100%, 150%, 200%, 300%, 350%, 400%, 500%, 600%, 700%, 800%, 900%, 1000% or more times the expression level or copy number of the biomarker in a control sample (e.g., sample from a healthy subjects not having the associated disease) and preferably, the average expression level or copy number of the biomarker in several control samples. In some embodiments, the level of the biomarker refers to the level of the biomarker itself, the level of a modified biomarker (e.g., phosphorylated biomarker), or to the level of a biomarker relative to another measured variable, such as a control (e.g., phosphorylated biomarker relative to an unphosphorylated biomarker).

[0044] The term “altered activity” of a biomarker refers to an activity of the biomarker which is increased or decreased in a disease state, e.g., in a cancer sample, as compared to the activity of the biomarker in a normal, control sample. Altered activity of the biomarker may be the result of, for example, altered expression of the biomarker, altered protein level of the biomarker, altered structure of the biomarker, or, e.g., an altered interaction with other proteins involved in the same or different pathway as the biomarker or altered interaction with transcriptional activators or inhibitors.

[0045] The term “altered structure” of a biomarker refers to the presence of mutations or allelic variants within a biomarker nucleic acid or protein, e.g., mutations which affect expression or activity of the biomarker nucleic acid or protein, as compared to the normal or wild-type gene or protein. For example, mutations include, but are not limited to substitutions, deletions, or addition mutations. Mutations may be present in the coding or non-coding region of the biomarker nucleic acid.

[0046] The term “SWI/SNF complex” refers to SWItch/Sucrose Non-Fermentable, a nucleosome remodeling complex found in both eukaryotes and prokaryotes (Neigeborn Carlson (1984) Genetics 108:845-858; Stern et al. (1984) J. Mol. Biol. 178:853-868). The SWI/SNF complex was first discovered in the yeast, Saccharomyces cerevisiae, named after yeast mating types switching (SWI) and sucrose nonfermenting (SNF) pathways (Workman and Kingston (1998) Annu Rev Biochem. 67:545-579; Sudarsanam and Winston (2000) Trends Genet. 16:345-351). It is a group of proteins comprising, at least, SWI1, SWI2/SNF2, SWI3, SWI5, and SWI6, as well as other polypeptides (Pazin and Kadonaga (1997) Cell 88:737-740). A genetic screening for suppressive mutations of the SWI/SNF phenotypes identified different histones and chromatin components, indicating that these proteins were possibly involved in histone binding and chromatin organization (Winston and Carlson (1992) Trends Genet. 8:387-391). Biochemical purification of the SWI/SNF2p in S. cerevisiae demonstrated that this protein was part of a complex containing an additional 11 polypeptides, with a combined molecular weight over 1.5 MDa. The SWI/SNF complex contains the ATPase Swi2/Snf2p, two actin-related proteins (Arp7p and Arp9) and other subunits involved in DNA and protein-protein interactions. The purified SWI/SNF complex was able to alter the nucleosome structure in an ATP-dependent manner (Workman and Kingston (1998), supra; Vignali et al. (2000) Mol Cell Biol. 20:1899-1910). The structures of the SWI/SNF and RSC complexes are highly conserved but not identical, reflecting an increasing complexity of chromatin (e.g., an increased genome size, the presence of DNA methylation, and more complex genetic organization) through evolution. For this reason, the SWI/SNF complex in higher eukaryotes maintains core components, but also substitute or add on other components with more specialized or tissue-specific domains. Yeast contains two distinct and similar remodeling complexes, SWI/SNF and RSC (Remodeling the Structure of Chromatin). In Drosophila, the two complexes are called BAP (Brahma Associated Protein) and PBAP (Polybromo-associated BAP) complexes. The human analogs are BAF (Brgl Associated Factors, or SWI/SNF-A) and PBAF (Polybromo-associated BAF, or SWI/SNF-B). The BAF complex comprises, at least, BAF250A (ARID1A), BAF250B (ARID1B), BAF57 (SMARCE1), BAF190/BRM (SMARCA2), BAF47 (SMARCB1), BAF53A (ACTL6A), BRG1/BAF190 (SMARCA4), BAF155 (SMARCC1), and BAF170 (SMARCC2). The PBAF complex comprises, at last, BAF200 (ARID2), BAF180 (PBRM1), BRD7, BAF45A (PHF10), BRG1/BAF190 (SMARCA4), BAF155 (SMARCC1), and BAF170 (SMARCC2). As in Drosophila, human BAF and PBAF share the different core components BAF47, BAF57, BAF60, BAF155, BAF170, BAF45 and the two actins b-Actin and BAF53 (Mohrmann and Verrijzer (2005) Biochim Biophys Acta. 1681:59-73). The central core of the BAF and PBAF is the ATPase catalytic subunit BRG1/hBRM, which contains multiple domains to bind to other protein subunits and acetylated histones. For a summary of different complex subunits and their domain structure, see Tang et al. (2010) Prog Biophys Mol Biol. 102:122-128 (e.g., FIG. 3), Hohmann and Vakoc (2014) Trends Genet. 30:356-363 (e.g., FIG. 1), and Kadoch and Crabtree (2015) Sci. Adv. 1:e1500447. For chromatin remodeling, the SWI/SNF complex use the energy of ATP hydrolysis to slide the DNA around the nucleosome. The first step consists in the binding between the remodeler and the nucleosome. This binding occurs with nanomolar affinity and reduces the digestion of nucleosomal DNA by nucleases. The 3-D structure of the yeast RSC complex was first solved and imaged using negative stain electron microscopy (Asturias et al. (2002) Proc Natl Acad Sci USA 99:13477-13480). The first Cryo-EM structure of the yeast SWI/SNF complex was published in 2008 (Dechassa et al. 2008). DNA footprinting data showed that the SWI/SNF complex makes close contacts with only one gyre of nucleosomal DNA. Protein crosslinking showed that the ATPase SWI2/SNF2p and Swi5p (the homologue of Ini1p in human), Snf6, Swi29, Snf11 and Sw82p (not conserved in human) make close contact with the histones. Several individual SWI/SNF subunits are encoded by gene families, whose protein products are mutually exclusive in the complex (Wu et al. (2009) Cell 136:200-206). Thus, only one paralog is incorporated in a given SWI/SNF assembly. The only exceptions are BAF155 and BAF170, which are always present in the complex as homo- or hetero-dimers.

[0047] Combinatorial association of SWI/SNF subunits could in principle give rise to hundreds of distinct complexes, although the exact number has yet to be determined (Wu et al. (2009), supra). Genetic evidence indicates that distinct subunit configurations of SWI/SNF are equipped to perform specialized functions. As an example, SWI/SNF contains one of two ATPase subunits, BRG1 or BRM/SMARCA2, which share 75% amino acid sequence identity (Khavari et al. (1993) Nature 366:170-174). While in certain cell types BRG1 and BRM can compensate for loss of the other subunit, in other contexts these two ATPases perform divergent functions (Strobeck et al. (2002) J Biol Chem. 277:4782-4789; Hoffman et al. (2014) Proc Natl Acad Sci USA. 111:3128-3133). In some cell types, BRG1 and BRM can even functionally oppose one another to regulate differentiation (Flowers et al. (2009) J Biol Chem. 284:10067-10075). The functional specificity of BRG1 and BRM has been linked to sequence variations near their N-terminus, which have different interaction specificities for transcription factors (Kadam and Emerson (2003) Mol Cell. 11:377-389). Another example of paralogous subunits that form mutually exclusive SWI/SNF complexes are ARID1A/BAF250A, ARID1B/BAF250B, and ARID2/BAF200. ARID1A and ARID1B share 60% sequence identity, but yet can perform opposing functions in regulating the cell cycle, with MYC being an important downstream target of each paralog (Nagl et al. (2007) EMBO J. 26:752-763). ARID2 has diverged considerably from ARID1A/ARID1B and exists in a unique SWI/SNF assembly known as PBAF (or SWI/SNF-B), which contains several unique subunits not found in ARID1A/B-containing complexes. The composition of SWI/SNF can also be dynamically reconfigured during cell fate transitions through cell type-specific expression patterns of certain subunits. For example, BAF53A/ACTL6A is repressed and replaced by BAF53B/ACTL6B during neuronal differentiation, a switch that is essential for proper neuronal functions in vivo (Lessard et al. (2007) Neuron 55:201-215). These studies stress that SWI/SNF in fact represents a collection of multi-subunit complexes whose integrated functions control diverse cellular processes, which is also incorporated in the scope of definitions of the instant disclosure. Two recently published meta-analyses of cancer genome sequencing data estimate that nearly 20% of human cancers harbor mutations in one (or more) of the genes encoding SWI/SNF (Kadoch et al. (2013) Nat Genet. 45:592-601; Shain and Pollack (2013) PLoS One. 8:e55119). Such mutations are generally loss-of-function, implicating SWI/SNF as a major tumor suppressor in diverse cancers. Specific SWI/SNF gene mutations are generally linked to a specific subset of cancer lineages: SNF5 is mutated in malignant rhabdoid tumors (MRT), PBRM1/BAF180 is frequently inactivated in renal carcinoma, and BRG1 is mutated in non-small cell lung cancer (NSCLC) and several other cancers. In the instant disclosure, the scope of “SWI/SNF complex” may cover at least one fraction or the whole complex (e.g., some or all subunit proteins/other components), either in the human BAF/PBAF forms or their homologs/orthologs in other species (e.g., the yeast and drosophila forms described herein). Preferably, a “SWI/SNF complex” described herein contains at least part of the full complex bio-functionality, such as binding to other subunits/components, binding to DNA/histone, catalyzing ATP, promoting chromatin remodeling, etc.

[0048] The term “BAF complex” refers to at least one type of mammalian SWI/SNF complexes. Its nucleosome remodeling activity can be reconstituted with a set of four core subunits (BRG1/SMARCA4, SNF5/SMARCB1, BAF155/SMARCC1, and BAF170/SMARCC2), which have orthologs in the yeast complex (Phelan et al. (1999) Mol Cell. 3:247-253). However, mammalian SWI/SNF contains several subunits not found in the yeast counterpart, which can provide interaction surfaces for chromatin (e.g. acetyl-lysine recognition by bromodomains) or transcription factors and thus contribute to the genomic targeting of the complex (Wang et al. (1996) EMBO J. 15:5370-5382; Wang et al. (1996) Genes Dev. 10:2117-2130; Nie et al. (2000)). A key attribute of mammalian SWI/SNF is the heterogeneity of subunit configurations that can exist in different tissues and even in a single cell type (e.g., as BAF, PBAF, neural progenitor BAF (npBAF), neuron BAF (nBAF), embryonic stem cell BAF (esBAF), etc.). In some embodiments, the BAF complex described herein refers to one type of mammalian SWI/SNF complexes, which is different from PBAF complexes.

[0049] The term “PBAF complex” refers to one type of mammalian SWI/SNF complexes originally known as SWI/SNF-B. It is highly related to the BAF complex and can be separated with conventional chromatographic approaches. For example, human BAF and PBAF complexes share multiple identical subunits (such as BRG, BAF170, BAF155, BAF60, BAF57, BAF53, BAF45, actin, SS18, and hSNF5/INI1). However, while BAF contains BAF250 subunit, PBAF contains BAF180 and BAF200, instead (Lemon et al. (2001) Nature 414:924-998; Yan et al. (2005) Genes Dev. 19:1662-1667). Moreover, they do have selectivity in regulating interferon-responsive genes (Yan et al. (2005), supra, showing that BAF200, but not BAF180, is required for PBAF to mediate expression of IFITMI gene induced by IFN-α, while the IFITM3 gene expression is dependent on BAF but not PBAF). Due to these differences, PBAF, but not BAF, was able to activate vitamin D receptor-dependent transcription on a chromatinzed template in vitro (Lemon et al. (2001), supra). The 3-D structure of human PBAF complex preserved in negative stain was found to be similar to yeast RSC but dramatically different from yeast SWI/SNF (Leschziner et al. (2005) Structure 13:267-275).

[0050] The term “BRG” or “BRG1/BAF190 (SMARCA4)” refers to a subunit of the SWI/SNF complex, which can be find in either BAF or PBAF complex. It is an ATP-depedendent helicase and a transcription activator, encoded by the SMARCA4 gene. BRG1 can also bind BRCA1, as well as regulate the expression of the tumorigenic protein CD44.

[0051] BRG1 is important for development past the pre-implantation stage. Without having a functional BRG1, exhibited with knockout research, the embryo will not hatch out of the zona pellucida, which will inhibit implantation from occurring on the endometrium (uterine wall). BRG1 is also crucial to the development of sperm. During the first stages of meiosis in spermatogenesis there are high levels of BRG1. When BRG1 is genetically damaged, meiosis is stopped in prophase 1, hindering the development of sperm and would result in infertility. More knockout research has concluded BRG1's aid in the development of smooth muscle. In a BRG1 knockout, smooth muscle in the gastrointestinal tract lacks contractility, and intestines are incomplete in some cases. Another defect occurring in knocking out BRG1 in smooth muscle development is heart complications such as an open ductus arteriosus after birth (Kim et al. (2012) Development 139:1133-1140; Zhang et al. (2011) Mol. Cell. Biol. 31:2618-2631). Mutations in SMARCA4 were first recognized in human lung cancer cell lines (Medina et al. (2008) Hum. Mut. 29:617-622). Later it was recognized that mutations exist in a significant frequency of medulloblastoma and pancreatic cancers among other tumor subtypes (Jones et al. (2012) Nature 488:100-105; Shain et al. (2012) Proc Natl Acad Sci USA 109:E252-E259; Shain and Pollack (2013), supra). Mutations in BRG1 (or SMARCA4) appear to be mutually exclusive with the presence of activation at any of the MYC-genes, which indicates that the BRG1 and MYC proteins are functionally related. Another recent study demonstrated a causal role of BRG1 in the control of retinoic acid and glucocorticoid-induced cell differentiation in lung cancer and in other tumor types. This enables the cancer cell to sustain undifferentiated gene expression programs that affect the control of key cellular processes. Furthermore, it explains why lung cancer and other solid tumors are completely refractory to treatments based on these compounds that are effective therapies for some types of leukemia (Romero et al. (2012) EMBO Mol. Med. 4:603-616). The role of BRG1 in sensitivity or resistance to anti-cancer drugs had been recently highlighted by the elucidation of the mechanisms of action of darinaparsin, an arsenic-based anti-cancer drugs. Darinaparsin has been shown to induce phosphorylation of BRG1, which leads to its exclusion from the chromatin. When excluded from the chromatin, BRG1 can no longer act as a transcriptional co-regulator.

[0052] This leads to the inability of cells to express HO-1, a cytoprotective enzyme. BRG1 has been shown to interact with proteins such as ACTL6A, ARID1A, ARID1B, BRCA1, CTNNB1, CBX5, CREBBP, CCNE1, ESR1, FANCA, HSP90B1, ING1, Myc, NR3C1, P53, POLR2A, PHB, SIN3A, SMARCB1, SMARCC1, SMARCC2, SMARCE1, STAT2, STK11, etc.

[0053] The term “BRG” or “BRG1/BAF190 (SMARCA4)” is intended to include fragments, variants (e.g., allelic variants), and derivatives thereof. Representative human BRG1(SMARCA4) cDNA and human BRG1 protein sequences are well-known in the art and are publicly available from the National Center for Biotechnology Information (NCBI). For example, seven different human BRG1 isoforms are known. Human BRG1 isoform A (NP_001122321.1) is encodable by the transcript variant 1 (NM_001128849.1), which is the longest transcript. Human BRG1 isoform B (NP_001122316.1 or NP_003063.2) is encodable by the transcript variant 2 (NM_001128844.1), which differs in the 5′ UTR and lacks an alternate exon in the 3′ coding region, compared to the variant 1, and also by the transcript variant 3 (NM_003072.3), which lacks an alternate exon in the 3′ coding region compared to variant 1. Human BRG1 isoform C (NP_001122317.1) is encodable by the transcript variant 4 (NM_001128845.1), which lacks two alternate in-frame exons and uses an alternate splice site in the 3′ coding region, compared to variant 1. Human BRG1 isoform D (NP_001122318.1) is encodable by the transcript variant 5 (NM_001128846.1), which lacks two alternate in-frame exons and uses two alternate splice sites in the 3′ coding region, compared to variant 1. Human BRG1 isoform E (NP_001122319.1) is encodable by the transcript variant 6 (NM_001128847.1), which lacks two alternate in-frame exons in the 3′ coding region, compared to variant 1. Human BRG1 isoform F (NP_001122320.1) is encodable by the transcript variant 7 (NM_001128848.1), which lacks two alternate in-frame exons and uses an alternate splice site in the 3′ coding region, compared to variant 1. Nucleic acid and polypeptide sequences of BRG1 orthologs in organisms other than humans are well known and include, for example, chimpanzee BRG1 (XM_016935029.1 and XP_016790518.1, XM_016935038.1 and XP_016790527.1, XM_016935039.1 and XP_016790528.1, XM_016935036.1 and XP_016790525.1, XM_016935037.1 and XP_016790526.1, XM_016935041.1 and XP_016790530.1, XM_016935040.1 and XP_016790529.1, XM_016935042.1 and XP_016790531.1, XM_016935043.1 and XP_016790532.1, XM_016935035.1 and XP_016790524.1, XM_016935032.1 and XP_016790521.1, XM_016935033.1 and XP_016790522.1, XM_016935030.1 and XP_016790519.1, XM_016935031.1 and XP_016790520.1, and XM_016935034.1 and XP_016790523.1), Rhesus monkey BRG1 (XM_015122901.1 and XP_014978387.1, XM_015122902.1 and XP_014978388.1, XM_015122903.1 and XP_014978389.1, XM_015122906.1 and XP_014978392.1, XM_015122905.1 and XP_014978391.1, XM_015122904.1 and XP_014978390.1, XM_015122907.1 and XP_014978393.1, XM_015122909.1 and XP_014978395.1, and XM_015122910.1 and XP_014978396.1), dog BRG1 (XM_014122046.1 and XP_013977521.1, XM_014122043.1 and XP_013977518.1, XM_014122042.1 and XP_013977517.1, XM_014122041.1 and XP_013977516.1, XM_014122045.1 and XP_013977520.1, and XM_014122044.1 and XP_013977519.1), cattle BRG1 (NM_001105614.1 and NP_001099084.1), rat BRG1 (NM_134368.1 and NP_599195.1).

[0054] Anti-BRG1 antibodies suitable for detecting BRG1 protein are well-known in the art and include, for example, MABE1118, MABE121, MABE60, and 07-478 (poly- and mono-clonal antibodies from EMD Millipore, Billerica, MA), AM26021PU-N, AP23972PU-N, TA322909, TA322910, TA327280, TA347049, TA347050, TA347851, and TA349038 (antibodies from OriGene Technologies, Rockville, MD), NB100-2594, AF5738, NBP2-22234, NBP2-41270, NBP1-51230, and NBP1-40379 (antibodes from Novus Biologicals, Littleton, CO), ab110641, ab4081, ab215998, ab108318, ab70558, ab118558, ab133257, ab92496, ab196535, and ab196315 (antibodies from AbCam, Cambridge, MA), Cat #: 720129, 730011, 730051, MA1-10062, PA5-17003, and PA5-17008 (antibodies from ThermoFisher Scientific, Waltham, MA), GTX633391, GTX32478, GTX31917, GTX16472, and GTX50842 (antibodies from GeneTex, Irvine, CA), antibody 7749 (ProSci, Poway, CA), Brg-1 (N-15), Brg-1 (N-15) X, Brg-1 (H-88), Brg-1 (H-88) X, Brg-1 (P-18), Brg-1 (P-18) X, Brg-1 (G-7), Brg-1 (G-7) X, Brg-1 (H-10), and Brg-1 (H-10) X (antibodies from Santa Cruz Biotechnology, Dallas, TX), antibody of Cat. AF5738 (R&D Systmes, Minneapolis, MN), etc. In addition, reagents are well-known for detecting BRG1 expression. Moreover, mutilple siRNA, shRNA, CRISPR constructs for reducing BRG1 Expression can be found in the commercial product lists of the above-referenced companies. PFI 3 is a known small molecule inhibitor of polybromo 1 and BRG1 (e.g., Cat. B7744 from APExBIO, Houston, TX). It is to be noted that the term can further be used to refer to any combination of features described herein regarding BRG1 molecules. For example, any combination of sequence composition, percentage identify, sequence length, domain structure, functional activity, etc. can be used to describe an BRG1 molecule of the present invention.

[0055] The term “BRM” or “BRM/BAF190 (SMARCA2)” refers to a subunit of the SWI/SNF complex, which can be found in either BAF or PBAF complexes. It is an ATP-dependent helicase and a transcription activator, encoded by the SMARCA2 gene. The catalytic core of the SWI/SNF complex can be either of two closely related ATPases, BRM or BRG1, with the potential that the choice of alternative subunits is a key determinant of specificity. Instead of impeding differentiation as was seen with BRG1 depletion, depletion of BRM caused accelerated progression to the differentiation phenotype. BRM was found to regulate genes different from those as BRG1 targets and be capable of overriding BRG1-dependent activation of the osteocalcin promoter, due to its interaction with different ARID family members (Flowers et al. (2009), supra). The known binding partners for BRM include, for example, ACTL6A, ARID1B, CEBPB, POLR2A, Prohibitin, SIN3A, SMARCB1, and SMARCC1.

[0056] The term “BRM” or “BRM/BAF190 (SMARCA2)” is intended to include fragments, variants (e.g., allelic variants), and derivatives thereof. Representative human BRM (SMARCA2) cDNA and human BRM protein sequences are well-known in the art and are publicly available from the National Center for Biotechnology Information (NCBI). For example, seven different human BRM isoforms are known. Human BRM isoform A (NP_003061.3 or NP_001276325.1) is encodable by the transcript variant 1 (NM_003070.4), which is the longest transcript, or the transcript variant 3 (NM_001289396.1), which differs in the 5′ UTR, compared to variant 1. Human BRM isoform B (NP_620614.2) is encodable by the transcript variant 2 (NM_139045.3), which lacks an alternate in-frame exon in the coding region, compared to variant 1. Human BRM isoform C (NP_001276326.1) is encodable by the transcript variant 4 (NM_001289397.1), which uses an alternate in-frame splice site and lacks an alternate in-frame exon in the 3′ coding region, compared to variant 1. Human BRM isoform D (NP_001276327.1) is encodable by the transcript variant 5 (NM_001289398.1), which differs in the 5′ UTR, lacks a portion of the 5′ coding region, and initiates translation at an alternate downstream start codon, compared to variant 1. Human BRM isoform E (NP_001276328.1) is encodable by the transcript variant 6 (NM_001289399.1), which differs in the 5′ UTR, lacks a portion of the 5′ coding region, and initiates translation at an alternate downstream start codon, compared to variant 1. Human BRM isoform F (NP_001276329.1) is encodable by the transcript variant 7 (NM_001289400.1), which differs in the 5′ UTR, lacks a portion of the 5′ coding region, and initiates translation at an alternate downstream start codon, compared to variant 1. Nucleic acid and polypeptide sequences of BRM orthologs in organisms other than humans are well known and include, for example, chimpanzee BRM (XM_016960529.1 and XP_016816018.1), dog BRG1 (XM_005615906.2 and XP_005615963.1, XM_845066.4 and XP_850159.1, XM_005615905.2 and XP_005615962.1, XM_005615904.2 and XP_005615961.1, XM_005615903.2 and XP_005615960.1, and XM_005615902.2 and XP_005615959.1), cattle BRM (NM_001099115.2 and NP_001092585.1), rat BRM (NM_001004446.1 and NP_001004446.1).

[0057] Anti-BRM antibodies suitable for detecting BRM protein are well-known in the art and include, for example, antibody MABE89 (EMD Millipore, Billerica, MA), antibody TA351725 (OriGene Technologies, Rockville, MD), NBP1-90015, NBP1-80042, NB100-55308, NB100-55309, NB100-55307, and H00006595-M06 (antibodes from Novus Biologicals, Littleton, CO), ab15597, ab12165, ab58188, and ab200480 (antibodies from AbCam, Cambridge, MA), Cat #: 11966 and 6889 (antibodies from Cell Signaling, Danvers, MA), etc. In addition, reagents are well-known for detecting BRM expression. Moreover, mutilple siRNA, shRNA, CRISPR constructs for reducing BRM Expression can be found in the commercial product lists of the above-referenced companies. For example, BRM RNAi product H00006595-R02 (Novus Biologicals), CRISPER gRNA products from GenScript, Piscataway, NJ, and other inhibitory RNA products from Origene, ViGene Biosciences (Rockville, MD), and Santa Cruz. It is to be noted that the term can further be used to refer to any combination of features described herein regarding BRM molecules. For example, any combination of sequence composition, percentage identify, sequence length, domain structure, functional activity, etc. can be used to describe an BRM molecule of the present invention.

[0058] The term “BAF250A” or “ARID1A” refers to AT-rich interactive domain-containing protein 1A, a subunit of the SWI/SNF complex, which can be find in BAF but not PBAF complex. In humans there are two BAF250 isoforms, BAF250A/ARID1A and BAF250B/ARID1B. They are thought to be E3 ubiquitin ligases that target histone H2B (Li et al. (2010) Mol. Cell. Biol. 30:1673-1688). ARID1A is highly expressed in the spleen, thymus, prostate, testes, ovaries, small intestine, colon and peripheral leukocytes. ARID1A is involved in transcriptional activation and repression of select genes by chromatin remodeling. It is also involved in vitamin D-coupled transcription regulation by associating with the WINAC complex, a chromatin-remodeling complex recruited by vitamin D receptor. ARID1A belongs to the neural progenitors-specific chromatin remodeling (npBAF) and the neuron-specific chromatin remodeling (nBAF) complexes, which are involved in switching developing neurons from stem/progenitors to post-mitotic chromatin remodeling as they exit the cell cycle and become committed to their adult state. ARID1A also plays key roles in maintaining embryonic stem cell pluripotency and in cardiac development and function (Lei et al. (2012) J. Biol. Chem. 287:24255-24262; Gao et al. (2008) Proc. Natl. Acad. Sci. U.S.A. 105:6656-6661). Loss of BAF250a expression was seen in 42% of the ovarian clear cell carcinoma samples and 21% of the endometrioid carcinoma samples, compared with just 1% of the high-grade serous carcinoma samples. ARID1A deficiency also impairs the DNA damage checkpoint and sensitizes cells to PARP inhibitors (Shen et al. (2015) Cancer Discov. 5:752-767). Human ARID1A protein has 2285 amino acids and a molecular mass of 242045 Da, with at least a DNA-binding domain that can specifically bind an AT-rich DNA sequence, recognized by a SWI/SNF complex at the beta-globin locus, and a C-terminus domain for glucocorticoid receptor-dependent transcriptional activation. ARID1A has been shown to interact with proteins such as SMARCB1/BAF47 (Kato et al. (2002) J. Biol. Chem. 277:5498-505; Wang et al. (1996) EMBO J. 15:5370-5382) and SMARCA4/BRG1 (Wang et al. (1996), supra; Zhao et al. (1998) Cell 95:625-636), etc.

[0059] The term “BAF250A” or “ARID1A” is intended to include fragments, variants (e.g., allelic variants), and derivatives thereof. Representative human BAF250A (ARID1A) cDNA and human BAF250A (ARID1A) protein sequences are well-known in the art and are publicly available from the National Center for Biotechnology Information (NCBI). For example, two different human ARID1A isoforms are known. Human ARID1A isoform A (NP_006006.3) is encodable by the transcript variant 1 (NM_006015.4), which is the longer transcript. Human ARID1A isoform B (NP_624361.1) is encodable by the transcript variant 2 (NM_139135.2), which lacks a segment in the coding region compared to variant 1. Isoform B thus lacks an internal segment, compared to isoform A. Nucleic acid and polypeptide sequences of ARID1A orthologs in organisms other than humans are well known and include, for example, chimpanzee ARID1A (XM_016956953.1 and XP_016812442.1, XM_016956958.1 and XP_016812447.1, and XM_009451423.2 and XP_009449698.2), Rhesus monkey ARID1A (XM_015132119.1 and XP_014987605.1, and XM_015132127.1 and XP_014987613.1), dog ARID1A (XM_847453.5 and XP_852546.3, XM_005617743.2 and XP_005617800.1, XM_005617742.2 and XP_005617799.1, XM_005617744.2 and XP_005617801.1, XM_005617746.2 and XP_005617803.1, and XM_005617745.2 and XP_005617802.1), cattle ARID1A (NM_001205785.1 and NP_001192714.1), rat ARID1A (NM_001106635.1 and NP_001100105.1).

[0060] Anti-ARID1A antibodies suitable for detecting ARID1A protein are well-known in the art and include, for example, antibody Cat #04-080 (EMD Millipore, Billerica, MA), antibodies TA349170, TA350870, and TA350871 (OriGene Technologies, Rockville, MD), antibodies NBP1-88932, NB100-55334, NBP2-43566, NB100-55333, and H00008289-QO1 (Novus Biologicals, Littleton, CO), antibodies ab182560, ab182561, ab176395, and ab97995 (AbCam, Cambridge, MA), antibodies Cat #: 12354 and 12854 (Cell Signaling Technology, Danvers, MA), antibodies GTX129433, GTX129432, GTX632013, GTX12388, and GTX31619 (GeneTex, Irvine, CA), etc. In addition, reagents are well-known for detecting ARID1A expression. For example, multiple clinical tests for ARID1A are available at NIH Genetic Testing Registry (GTR®) (e.g., GTR Test ID: GTR000520952.1 for mental retardation, offered by Centogene AG, Germany). Moreover, multiple siRNA, shRNA, CRISPR constructs for reducing ARID1A Expression can be found in the commercial product lists of the above-referenced companies, such as RNAi products H00008289-RO1, H00008289-R02, and H00008289-R03 (Novus Biologicals) and CRISPR products KN301547G1 and KN301547G2 (Origene). Other CRISPR products include sc-400469 (Santa Cruz Biotechnology) and those from GenScript (Piscataway, NJ). It is to be noted that the term can further be used to refer to any combination of features described herein regarding ARID1A molecules. For example, any combination of sequence composition, percentage identify, sequence length, domain structure, functional activity, etc. can be used to describe an ARID1A molecule of the present invention.

[0061] The term “loss-of-function mutation” for BAF250A/ARID1A refers to any mutation in an ARID1A-related nucleic acid or protein that results in reduced or eliminated ARID1A protein amounts and/or function. For example, nucleic acid mutations include single-base substitutions, multi-base substitutions, insertion mutations, deletion mutations, frameshift mutations, missesnse mutations, nonsense mutations, splice-site mutations, epigenetic modifications (e.g., methylation, phosphorylation, acetylation, ubiquitylation, sumoylation, histone acetylation, histone deacetylation, and the like), and combinations thereof. In some embodiments, the mutation is a “nonsynonymous mutation,” meaning that the mutation alters the amino acid sequence of ARID1A. Such mutations reduce or eliminate ARID1A protein amounts and/or function by eliminating proper coding sequences required for proper ARID1A protein translation and/or coding for ARID1A proteins that are non-functional or have reduced function (e.g., deletion of enzymatic and/or structural domains, reduction in protein stability, alteration of sub-cellular localization, and the like). Such mutations are well-known in the art. In addition, a representative list describing a wide variety of structural mutations correlated with the functional result of reduced or eliminated ARID1A protein amounts and/or function is described in the Tables and the Examples.

[0062] The term “BAF250B” or “ARID1B” refers to AT-rich interactive domain-containing protein 1B, a subunit of the SWI/SNF complex, which can be find in BAF but not PBAF complex. ARID1B and ARID1A are alternative and mutually exclusive ARID-subunits of the SWI/SNF complex. Germline mutations in ARID1B are associated with Coffin-Siris syndrome (Tsurusaki et al. (2012) Nat. Genet. 44:376-378; Santen et al. (2012) Nat. Genet. 44:379-380). Somatic mutations in ARID1B are associated with several cancer subtypes, indicating that it is a tumor suppressor gene (Shai and Pollack (2013) PLoS ONE 8:e55119; Sausen et al. (2013) Nat. Genet. 45:12-17; Shain et al. (2012) Proc. Natl. Acad. Sci. U.S.A. 109:E252-E259; Fujimoto et al. (2012) Nat. Genet. 44:760-764). Human ARID1A protein has 2236 amino acids and a molecular mass of 236123 Da, with at least a DNA-binding domain that can specifically bind an AT-rich DNA sequence, recognized by a SWI/SNF complex at the beta-globin locus, and a C-terminus domain for glucocorticoid receptor-dependent transcriptional activation. ARID1B has been shown to interact with SMARCA4/BRG1 (Hurlstone et al. (2002) Biochem. J. 364:255-264; Inoue et al. (2002) J. Biol. Chem. 277:41674-41685 and SMARCA2/BRM (Inoue et al. (2002), supra).

[0063] The term “BAF250B” or “ARID1B” is intended to include fragments, variants (e.g., allelic variants), and derivatives thereof. Representative human BAF250B (ARID1B) cDNA and human BAF250B (ARID1B) protein sequences are well-known in the art and are publicly available from the National Center for Biotechnology Information (NCBI). For example, three different human ARID1B isoforms are known. Human ARID1B isoform A (NP_059989.2) is encodable by the transcript variant 1 (NM_017519.2). Human ARID1B isoform B (NP_065783.3) is encodable by the transcript variant 2 (NM_020732.3). Human ARID1B isoform C (NP_001333742.1) is encodable by the transcript variant 3 (NM_001346813.1). Nucleic acid and polypeptide sequences of ARID1B orthologs in organisms other than humans are well known and include, for example, Rhesus monkey ARID1B (XM_015137088.1 and XP_014992574.1), dog ARID1B (XM_014112912.1 and XP_013968387.1), cattle ARID1B (XM_010808714.2 and XP_010807016.1, and XM_015464874.1 and XP_015320360.1), rat ARID1B (XM_017604567.1 and XP_017460056.1).

[0064] Anti-ARID1B antibodies suitable for detecting ARID1B protein are well-known in the art and include, for example, antibody Cat #ABE316 (EMD Millipore, Billerica, MA), antibody TA315663 (OriGene Technologies, Rockville, MD), antibodies H00057492-M02, H00057492-MO1, NB100-57485, NBP1-89358, and NB100-57484 (Novus Biologicals, Littleton, CO), antibodies ab57461, ab69571, ab84461, and ab163568 (AbCam, Cambridge, MA), antibodies Cat #: PA5-38739, PA5-49852, and PA5-50918 (ThermoFisher Scientific, Danvers, MA), antibodies GTX130708, GTX60275, and GTX56037 (GeneTex, Irvine, CA), ARID1B (KMN1) Antibody and other antibodies (Santa Cruz Biotechnology), etc. In addition, reagents are well-known for detecting ARID1B expression. For example, multiple clinical tests for ARID1B are available at NIH Genetic Testing Registry (GTR®) (e.g., GTR Test ID: GTR000520953.1 for mental retardation, offered by Centogene AG, Germany). Moreover, multiple siRNA, shRNA, CRISPR constructs for reducing ARID1B Expression can be found in the commercial product lists of the above-referenced companies, such as RNAi products H00057492-R03, H00057492-RO1, and H00057492-R02 (Novus Biologicals) and CRISPR products KN301548 and KN214830 (Origene). Other CRISPR products include sc-402365 (Santa Cruz Biotechnology) and those from GenScript (Piscataway, NJ). It is to be noted that the term can further be used to refer to any combination of features described herein regarding ARID1B molecules. For example, any combination of sequence composition, percentage identify, sequence length, domain structure, functional activity, etc. can be used to describe an ARID1B molecule of the present invention.

[0065] The term “loss-of-function mutation” for BAF250B/ARID1B refers to any mutation in an ARID1B-related nucleic acid or protein that results in reduced or eliminated ARID1B protein amounts and/or function. For example, nucleic acid mutations include single-base substitutions, multi-base substitutions, insertion mutations, deletion mutations, frameshift mutations, missesnse mutations, nonsense mutations, splice-site mutations, epigenetic modifications (e.g., methylation, phosphorylation, acetylation, ubiquitylation, sumoylation, histone acetylation, histone deacetylation, and the like), and combinations thereof. In some embodiments, the mutation is a “nonsynonymous mutation,” meaning that the mutation alters the amino acid sequence of ARID1B. Such mutations reduce or eliminate ARID1B protein amounts and/or function by eliminating proper coding sequences required for proper ARID1B protein translation and/or coding for ARID1B proteins that are non-functional or have reduced function (e.g., deletion of enzymatic and/or structural domains, reduction in protein stability, alteration of sub-cellular localization, and the like). Such mutations are well-known in the art. In addition, a representative list describing a wide variety of structural mutations correlated with the functional result of reduced or eliminated ARID1B protein amounts and/or function is described in the Tables and the Examples.

[0066] The term “SMARCC1” refers to SWI/SNF related, matrix associated, actin dependent regulator of chromatin subfamily c member 1. SMARCC1 is a member of the SWI/SNF family of proteins, whose members display helicase and ATPase activities and which are thought to regulate transcription of certain genes by altering the chromatin structure around those genes. The encoded protein is part of the large ATP-dependent chromatin remodeling complex SNF/SWI and contains a predicted leucine zipper motif typical of many transcription factors. SMARCC1 is a component of SWI/SNF chromatin remodeling complexes that carry out key enzymatic activities, changing chromatin structure by altering DNA-histone contacts within a nucleosome in an ATP-dependent manner. SMARCC1 stimulates the ATPase activity of the catalytic subunit of the complex (Phelan et al. (1999) Mol Cell 3:247-253). SMARCC1 belongs to the neural progenitors-specific chromatin remodeling complex (npBAF complex) and the neuron-specific chromatin remodeling complex (nBAF complex). During neural development a switch from a stem/progenitor to a postmitotic chromatin remodeling mechanism occurs as neurons exit the cell cycle and become committed to their adult state. The transition from proliferating neural stem/progenitor cells to postmitotic neurons requires a switch in subunit composition of the npBAF and nBAF complexes. As neural progenitors exit mitosis and differentiate into neurons, npBAF complexes which contain ACTL6A/BAF53A and PHF10/BAF45A, are exchanged for homologous alternative ACTL6B/BAF53B and DPF1/BAF45B or DPF3/BAF45C subunits in neuron-specific complexes (nBAF). The npBAF complex is essential for the self-renewal/proliferative capacity of the multipotent neural stem cells. The nBAF complex along with CREST plays a role regulating the activity of genes essential for dendrite growth. Human SMARCC1 protein has 1105 amino acids and a molecular mass of 122867 Da. Binding partners of SMARCC1 include, e.g., NR3C1, SMARD1, TRIP12, CEBPB, KDM6B, and MKKS.

[0067] The term “SMARCC1” is intended to include fragments, variants (e.g., allelic variants), and derivatives thereof. Representative human SMARCC1 cDNA and human SMARCC1 protein sequences are well-known in the art and are publicly available from the National Center for Biotechnology Information (NCBI). For example, human SMARCC1 protein (NP_003065.3) is encodable by the transcript (NM_003074.3). Nucleic acid and polypeptide sequences of SMARCC1 orthologs in organisms other than humans are well known and include, for example, chimpanzee SMARCC1 (XM_016940956.2 and XP_016796445.1, XM_001154676.6 and XP_001154676.1, XM_016940957.1 and XP_016796446.1, and XM_009445383.3 and XP_009443658.1), Rhesus monkey SMARCC1 (XM_015126104.1 and XP_014981590.1, XM_015126103.1 and XP_014981589.1, XM_001083389.3 and XP_001083389.2, and XM_015126105.1 and XP_014981591.1), dog SMARCC1 (XM_533845.6 and XP_533845.2, XM_014122183.2 and XP_013977658.1, and XM_014122184.2 and XP_013977659.1), cattle SMARCC1 (XM_024983285.1 and XP_024839053.1), mouse SMARCC1 (NM_009211.2 and NP_033237.2), rat SMARCC1 (NM_001106861.1 and NP_001100331.1), chicken SMARCC1 (XM_025147375.1 and XP_025003143.1, and XM_015281170.2 and XP_015136656.2), tropical clawed frog SMARCC1 (XM_002942718.4 and XP_002942764.2), and zebrafish SMARCC1 (XM_003200246.5 and XP_003200294.1, and XM_005158282.4 and XP_005158339.1). Representative sequences of SMARCC1 orthologs are presented below in Table 1.

[0068] Anti-SMARCC1 antibodies suitable for detecting SMARCC1 protein are well-known in the art and include, for example, antibody TA334040 (Origene), antibodies NBP1-88720, NBP2-20415, NBP1-88721, and NB100-55312 (Novus Biologicals, Littleton, CO), antibodies ab172638, ab126180, and ab22355 (AbCam, Cambridge, MA), antibody Cat #PA5-30174 (ThermoFisher Scientific), antibody Cat #27-825 (ProSci, Poway, CA), etc. In addition, reagents are well-known for detecting SMARCC1. A clinical test of SMARCC1 for hereditary disese is available with the test ID no. GTR000558444.1 in NIH Genetic Testing Registry (GTR®), offered by Tempus Labs, Inc., (Chicago, IL). Moreover, mutilple siRNA, shRNA, CRISPR constructs for reducing SMARCC1 expression can be found in the commercial product lists of the above-referenced companies, such as siRNA products #sc-29780 and sc-29781 and CRISPR product #sc-400838 from Santa Cruz Biotechnology, RNAi products SR304474 and TL309245V, and CRISPR product KN208534 (Origene), and multiple CRISPR products from GenScript (Piscataway, NJ). It is to be noted that the term can further be used to refer to any combination of features described herein regarding SMARCC1 molecules. For example, any combination of sequence composition, percentage identify, sequence length, domain structure, functional activity, etc. can be used to describe a SMARCC1 molecule encompassed by the present invention.

[0069] The term “SMARCC2” refers to SWI/SNF related, matrix associated, actin dependent regulator of chromatin subfamily c member 2. SMARCC2 is an important paralog of gene SMARCC1. SMARCC2 is a member of the SWI/SNF family of proteins, whose members display helicase and ATPase activities and which are thought to regulate transcription of certain genes by altering the chromatin structure around those genes. The encoded protein is part of the large ATP-dependent chromatin remodeling complex SNF/SWI and contains a predicted leucine zipper motif typical of many transcription factors. SMARCC2 is a component of SWI/SNF chromatin remodeling complexes that carry out key enzymatic activities, changing chromatin structure by altering DNA-histone contacts within a nucleosome in an ATP-dependent manner (Kadam et al. (2000) Genes Dev 14:2441-2451). SMARCC2 can stimulate the ATPase activity of the catalytic subunit of the complex (Phelan et al. (1999) Mol Cell 3:247-253). SMARCC2 is required for CoREST dependent repression of neuronal specific gene promoters in non-neuronal cells (Battaglioli et al. (2002) J Biol Chem 277:41038-41045). SMARCC2 belongs to the neural progenitors-specific chromatin remodeling complex (npBAF complex) and the neuron-specific chromatin remodeling complex (nBAF complex). SMARCC2 is a critical regulator of myeloid differentiation, controlling granulocytopoiesis and the expression of genes involved in neutrophil granule formation. Human SMARCC2 protein has 1214 amino acids and a molecular mass of 132879 Da. Binding partners of SMARCC2 include, e.g., SIN3A, SMARD1, KDM6B, and RCOR1.

[0070] The term “SMARCC2” is intended to include fragments, variants (e.g., allelic variants), and derivatives thereof. Representative human SMARCC2 cDNA (NM_003074.3) and human SMARCC2 protein sequences (NP_003065.3) are well-known in the art and are publicly available from the National Center for Biotechnology Information (NCBI). For example, four different human SMARCC2 isoforms are known. Human SMARCC2 isoform a (NP_003066.2) is encodable by the transcript variant 1 (NM_003075.4). Human SMARCC2 isoform b (NP_620706.1) is encodable by the transcript variant 2 (NM_139067.3), which contains an alternate in-frame exon in the central coding region and uses an alternate in-frame splice site in the 3′ coding region, compared to variant 1. The encoded isoform (b), contains a novel internal segment, lacks a segment near the C-terminus, and is shorter than isoform a. Human SMARCC2 isoform c (NP_001123892.1) is encodable by the transcript variant 3 (NM_001130420.2), which contains an alternate in-frame exon in the central coding region and contains alternate in-frame segment in the 3′ coding region, compared to variant 1. The encoded isoform (c), contains a novel internal segment, lacks a segment near the C-terminus, and is shorter than isoform a. Human SMARCC2 isoform d (NP_001317217.1) is encodable by the transcript variant 4 (NM_001330288.1), which contains an alternate in-frame exon in the central coding region compared to variant 1. The encoded isoform (d), contains the same N- and C-termini, but is longer than isoform a. Nucleic acid and polypeptide sequences of SMARCC2 orthologs in organisms other than humans are well known and include, for example, chimpanzee SMARCC2 (XM_016923208.2 and XP_016778697.1, XM_016923212.2 and XP_016778701.1, XM_016923214.2 and XP_016778703.1, XM_016923210.2 and XP_016778699.1, XM_016923209.2 and XP_016778698.1, XM_016923213.2 and XP_016778702.1, XM_016923211.2 and XP_016778700.1, and XM_016923216.2 and XP_016778705.1), Rhesus monkey SMARCC2 (XM_015151975.1 and XP_015007461.1, XM_015151976.1 and XP_015007462.1, XM_015151974.1 and XP_015007460.1, XM_015151969.1 and XP_015007455.1, XM_015151972.1 and XP_015007458.1, XM_015151973.1 and XP_015007459.1, and XM_015151970.1 and XP_015007456.1), dog SMARCC2 (XM_022424046.1 and XP_022279754.1, XM_014117150.2 and XP_013972625.1, XM_014117149.2 and XP_013972624.1, XM_005625493.3 and XP_005625550.1, XM_014117151.2 and XP_013972626.1, XM_005625492.3 and XP_005625549.1, XM_005625495.3 and XP_005625552.1, XM_005625494.3 and XP_005625551.1, and XM_022424047.1 and XP_022279755.1), cattle SMARCC2 (NM_001172224.1 and NP_001165695.1), mouse SMARCC1 (NM_001114097.1 and NP_001107569.1, NM_001114096.1 and NP_001107568.1, and NM_198160.2 and NP_937803.1), rat SMARCC2 (XM_002729767.5 and XP_002729813.2, XM_006240805.3 and XP_006240867.1, XM_006240806.3 and XP_006240868.1, XM_001055795.6 and XP_001055795.1, XM_006240807.3 and XP_006240869.1, XM_008765050.2 and XP_008763272.1, XM_017595139.1 and XP_017450628.1, XM_001055673.6 and XP_001055673.1, and XM_001055738.6 and XP_001055738.1), and zebrafish SMARCC2 (XM_021474611.1 and XP_021330286.1). Representative sequences of SMARCC2 orthologs are presented below in Table 1.

[0071] Anti-SMARCC2 antibodies suitable for detecting SMARCC2 protein are well-known in the art and include, for example, antibody TA314552 (Origene), antibodies NBP1-90017 and NBP2-57277 (Novus Biologicals, Littleton, CO), antibodies ab71907, ab84453, and ab64853 (AbCam, Cambridge, MA), antibody Cat #PA5-54351 (ThermoFisher Scientific), etc. In addition, reagents are well-known for detecting SMARCC2. A clinical test of SMARCC2 for hereditary disese is available with the test ID no. GTR000546600.2 in NIH Genetic Testing Registry (GTR®), offered by Fulgent Clinical Diagnostics Lab (Temple City, CA). Moreover, mutilple siRNA, shRNA, CRISPR constructs for reducing SMARCC2 expression can be found in the commercial product lists of the above-referenced companies, such as siRNA products #sc-29782 and sc-29783 and CRISPR product #sc-402023 from Santa Cruz Biotechnology, RNAi products SR304475 and TL301505V, and CRISPR product KN203744 (Origene), and multiple CRISPR products from GenScript (Piscataway, NJ). It is to be noted that the term can further be used to refer to any combination of features described herein regarding SMARCC2 molecules. For example, any combination of sequence composition, percentage identify, sequence length, domain structure, functional activity, etc. can be used to describe a SMARCC2 molecule encompassed by the present invention.

[0072] The term “SMARCD1” refers to SWI/SNF related, matrix associated, actin dependent regulator of chromatin subfamily D member 1. SMARCD1 is a member of the SWI/SNF family of proteins, whose members display helicase and ATPase activities and which are thought to regulate transcription of certain genes by altering the chromatin structure around those genes. The encoded protein is part of the large ATP-dependent chromatin remodeling complex SNF/SWI and has sequence similarity to the yeast Swp73 protein. SMARCD1 is a component of SWI/SNF chromatin remodeling complexes that carry out key enzymatic activities, changing chromatin structure by altering DNA-histone contacts within a nucleosome in an ATP-dependent manner (Wang et al. (1996) Genes Dev 10:2117-2130). SMARCD1 belongs to the neural progenitors-specific chromatin remodeling complex (npBAF complex) and the neuron-specific chromatin remodeling complex (nBAF complex). SMARCD1 has a strong influence on vitamin D-mediated transcriptional activity from an enhancer vitamin D receptor element (VDRE). SMARCD1 a link between mammalian SWI-SNF-like chromatin remodeling complexes and the vitamin D receptor (VDR) heterodimer (Koszewski et al. (2003) J Steroid Biochem Mol Biol 87:223-231). SMARCD1 mediates critical interactions between nuclear receptors and the BRG1/SMARCA4 chromatin-remodeling complex for transactivation (Hsiao et al. (2003) Mol Cell Biol 23:6210-6220). Human SMARCD1 protein has 515 amino acids and a molecular mass of 58233 Da. Binding partners of SMARCD1 include, e.g., ESR1, NR3C1, NR1H4, PGR, SMARCA4, SMARCC1 and SMARCC2.

[0073] The term “SMARCD1” is intended to include fragments, variants (e.g., allelic variants), and derivatives thereof. Representative human SMARCD1 cDNA and human SMARCD1 protein sequences are well-known in the art and are publicly available from the National Center for Biotechnology Information (NCBI). For example, two different human SMARCD1 isoforms are known. Human SMARCD1 isoform a (NP_003067.3) is encodable by the transcript variant 1 (NM_003076.4), which is the longer transcript.

[0074] Human SMARCD1 isoform b (NP_620710.2) is encodable by the transcript variant 2 (NM_139071.2), which lacks an alternate in-frame exon, compared to variant 1, resulting in a shorter protein (isoform b), compared to isoform a. Nucleic acid and polypeptide sequences of SMARCD1 orthologs in organisms other than humans are well known and include, for example, chimpanzee SMARCD1 (XM_016923432.2 and XP_016778921.1, XM_016923431.2 and XP_016778920.1, and XM_016923433.2 and XP_016778922.1), Rhesus monkey SMARCD1 (XM_001111275.3 and XP_001111275.3, XM_001111166.3 and XP_001111166.3, and XM_001111207.3 and XP_001111207.3), dog SMARCD1 (XM_543674.6 and XP_543674.4), cattle SMARCD1 (NM_001038559.2 and NP_001033648.1), mouse SMARCD1 (NM_031842.2 and NP_114030.2), rat SMARCD1 (NM_001108752.1 and NP_001102222.1), chicken SMARCD1 (XM_424488.6 and XP_424488.3), tropical clawed frog SMARCD1 (NM_001004862.1 and NP_001004862.1), and zebrafish SMARCD1 (NM_198358.1 and NP_938172.1). Representative sequences of SMARCD1 orthologs are presented below in Table 1.

[0075] Anti-SMARCD1 antibodies suitable for detecting SMARCD1 protein are well-known in the art and include, for example, antibody TA344378 (Origene), antibodies NBP1-88719 and NBP2-20417 (Novus Biologicals, Littleton, CO), antibodies ab224229, ab83208, and ab86029 (AbCam, Cambridge, MA), antibody Cat #PA5-52049 (ThermoFisher Scientific), etc. In addition, reagents are well-known for detecting SMARCD1. A clinical test of SMARCD1 for hereditary disese is available with the test ID no. GTR000558444.1 in NIH Genetic Testing Registry (GTR®), offered by Tempus Labs, Inc., (Chicago, IL). Moreover, mutilple siRNA, shRNA, CRISPR constructs for reducing SMARCD1 expression can be found in the commercial product lists of the above-referenced companies, such as siRNA products #sc-72597 and sc-725983 and CRISPR product #sc-402641 from Santa Cruz Biotechnology, RNAi products SR304476 and TL301504V, and CRISPR product KN203474 (Origene), and multiple CRISPR products from GenScript (Piscataway, NJ). It is to be noted that the term can further be used to refer to any combination of features described herein regarding SMARCD1 molecules. For example, any combination of sequence composition, percentage identify, sequence length, domain structure, functional activity, etc. can be used to describe a SMARCD1 molecule encompassed by the present invention.

[0076] The term “SMARCD2” refers to SWI/SNF related, matrix associated, actin dependent regulator of chromatin subfamily D member 2. SMARCD2 is a member of the SWI/SNF family of proteins, whose members display helicase and ATPase activities and which are thought to regulate transcription of certain genes by altering the chromatin structure around those genes. The encoded protein is part of the large ATP-dependent chromatin remodeling complex SNF/SWI and has sequence similarity to the yeast Swp73 protein. SMARCD2 is a component of SWI/SNF chromatin remodeling complexes that carry out key enzymatic activities, changing chromatin structure by altering DNA-histone contacts within a nucleosome in an ATP-dependent manner (Euskirchen et al. (2012) J Biol Chem 287:30897-30905; Kadoch et al. (2015) Sci Adv 1(5):e1500447). SMARCD2 is a critical regulator of myeloid differentiation, controlling granulocytopoiesis and the expression of genes involved in neutrophil granule formation (Witzel et al. (2017) Nat Genet 49:742-752). Human SMARCD2 protein has 531 amino acids and a molecular mass of 589213 Da. Binding partners of SMARCD2 include, e.g., UNKL and CEBPE.

[0077] The term “SMARCD2” is intended to include fragments, variants (e.g., allelic variants), and derivatives thereof. Representative human SMARCD2 cDNA and human SMARCD2 protein sequences are well-known in the art and are publicly available from the National Center for Biotechnology Information (NCBI). For example, three different human SMARCD2 isoforms are known. Human SMARCD2 isoform 1 (NP_001091896.1) is encodable by the transcript variant 1 (NM_001098426.1). Human SMARCD2 isoform 2 (NP_001317368.1) is encodable by the transcript variant 2 (NM_001330439.1). Human SMARCD2 isoform 3 (NP_001317369.1) is encodable by the transcript variant 3 (NM_001330440.1). Nucleic acid and polypeptide sequences of SMARCD2 orthologs in organisms other than humans are well known and include, for example, chimpanzee SMARCD2 (XM_009433047.3 and XP_009431322.1, XM_001148723.6 and XP_001148723.1, XM_009433048.3 and XP_009431323.1, XM_009433049.3 and XP_009431324.1, XM_024350546.1 and XP_024206314.1, and XM_024350547.1 and XP_024206315.1), Rhesus monkey SMARCD2 (XM_015120093.1 and XP_014975579.1), dog SMARCD2 (XM_022422831.1 and XP_022278539.1, XM_005624251.3 and XP_005624308.1, XM_845276.5 and XP_850369.1, and XM_005624252.3 and XP_005624309.1), cattle SMARCD2 (NM_001205462.3 and NP_001192391.1), mouse SMARCC1 (NM_001130187.1 and NP_001123659.1, and NM_031878.2 and NP_114084.2), rat SMARCD2 (NM_031983.2 and NP_114189.1), chicken SMARCD2 (XM_015299406.2 and XP_015154892.1), tropical clawed frog SMARCD2 (NM_001045802.1 and NP_001039267.1), and zebrafish SMARCD2 (XM_687657.6 and XP_692749.2, and XM_021480266.1 and XP_021335941.1). Representative sequences of SMARCD2 orthologs are presented below in Table 1.

[0078] Anti-SMARCD2 antibodies suitable for detecting SMARCD2 protein are well-known in the art and include, for example, antibody TA335791 (Origene), antibodies H00006603-M02 and H00006603-MO1 (Novus Biologicals, Littleton, CO), antibodies ab81622, ab56241, and ab221084 (AbCam, Cambridge, MA), antibody Cat #51-805 (ProSci, Poway, CA), etc. In addition, reagents are well-known for detecting SMARCD2. A clinical test of SMARCD2 for hereditary disese is available with the test ID no. GTR000558444.1 in NIH Genetic Testing Registry (GTR®), offered by Tempus Labs, Inc., (Chicago, IL). Moreover, mutilple siRNA, shRNA, CRISPR constructs for reducing SMARCD2 expression can be found in the commercial product lists of the above-referenced companies, such as siRNA products #sc-93762 and sc-153618 and CRISPR product #sc-403091 from Santa Cruz Biotechnology, RNAi products SR304477 and TL309244V, and CRISPR product KN214286 (Origene), and multiple CRISPR products from GenScript (Piscataway, NJ). It is to be noted that the term can further be used to refer to any combination of features described herein regarding SMARCD2 molecules. For example, any combination of sequence composition, percentage identify, sequence length, domain structure, functional activity, etc. can be used to describe a SMARCD2 molecule encompassed by the present invention.

[0079] The term “SMARCD3” refers to SWI/SNF related, matrix associated, actin dependent regulator of chromatin subfamily D member 3. SMARCD3 is a member of the SWI/SNF family of proteins, whose members display helicase and ATPase activities and which are thought to regulate transcription of certain genes by altering the chromatin structure around those genes. The encoded protein is part of the large ATP-dependent chromatin remodeling complex SNF/SWI and has sequence similarity to the yeast Swp73 protein. SMARCD3 is a component of SWI/SNF chromatin remodeling complexes that carry out key enzymatic activities, changing chromatin structure by altering DNA-histone contacts within a nucleosome in an ATP-dependent manner. SMARCD3 stimulates nuclear receptor mediated transcription. SMARCD3 belongs to the neural progenitors-specific chromatin remodeling complex (npBAF complex) and the neuron-specific chromatin remodeling complex (nBAF complex). Human SMARCD3 protein has 483 amino acids and a molecular mass of 55016 Da. Binding partners of SMARCD3 include, e.g., PPARG/NR1C3, RXRA/NR1F1, ESR1, NR5A1, NR5A2/LRH1 and other transcriptional activators including the HLH protein SREBF1/SREBP1 and the homeobox protein PBX1.

[0080] The term “SMARCD3” is intended to include fragments, variants (e.g., allelic variants), and derivatives thereof. Representative human SMARCD3 cDNA and human SMARCD3 protein sequences are well-known in the art and are publicly available from the National Center for Biotechnology Information (NCBI). For example, two different human SMARCD3 isoforms are known. Human SMARCD3 isoform 1 (NP_001003802.1 and NP_003069.2) is encodable by the transcript variant 1 (NM_001003802.1) and the transcript variant 2 (NM_003078.3). Human SMARCD2 isoform 2 (NP_001003801.1) is encodable by the transcript variant 3 (NM_001003801.1). Nucleic acid and polypeptide sequences of SMARCD3 orthologs in organisms other than humans are well known and include, for example, chimpanzee SMARCD3 (XM_016945944.2 and XP_016801433.1, XM_016945946.2 and XP_016801435.1, XM_016945945.2 and XP_016801434.1, and XM_016945943.2 and XP_016801432.1), Rhesus monkey SMARCD3 (NM_001260684.1 and NP_001247613.1), cattle SMARCD3 (NM_001078154.1 and NP_001071622.1), mouse SMARCC3 (NM_025891.3 and NP_080167.3), rat SMARCD3 (NM_001011966.1 and NP_001011966.1). Representative sequences of SMARCD3 orthologs are presented below in Table 1.

[0081] Anti-SMARCD3 antibodies suitable for detecting SMARCD3 protein are well-known in the art and include, for example, antibody TA811107 (Origene), antibodies H00006604-MO1 and NBP2-39013 (Novus Biologicals, Littleton, CO), antibodies ab171075, ab131326, and ab50556 (AbCam, Cambridge, MA), antibody Cat #720131 (ThermoFisher Scientific), antibody Cat #28-327 (ProSci, Poway, CA), etc. In addition, reagents are well-known for detecting SMARCD3. A clinical test of SMARCD3 for hereditary disese is available with the test ID no. GTR000558444.1 in NIH Genetic Testing Registry (GTR®), offered by Tempus Labs, Inc., (Chicago, IL). Moreover, mutilple siRNA, shRNA, CRISPR constructs for reducing SMARCD3 expression can be found in the commercial product lists of the above-referenced companies, such as siRNA products #sc-89355 and sc-108054 and CRISPR product #sc-402705 from Santa Cruz Biotechnology, RNAi products SR304478 and TL309243V, and CRISPR product KN201135 (Origene), and multiple CRISPR products from GenScript (Piscataway, NJ). It is to be noted that the term can further be used to refer to any combination of features described herein regarding SMARCD3 molecules. For example, any combination of sequence composition, percentage identify, sequence length, domain structure, functional activity, etc. can be used to describe a SMARCD3 molecule encompassed by the present invention.

[0082] The term “SMARCE1” refers to SWI/SNF related, matrix associated, actin dependent regulator of chromatin subfamily E member 1. The protein encoded by this gene is part of the large ATP-dependent chromatin remodeling complex SWI/SNF, which is required for transcriptional activation of genes normally repressed by chromatin. The encoded protein, either alone or when in the SWI/SNF complex, can bind to 4-way junction DNA, which is thought to mimic the topology of DNA as it enters or exits the nucleosome. The protein contains a DNA-binding HMG domain, but disruption of this domain does not abolish the DNA-binding or nucleosome-displacement activities of the SWI/SNF complex. Unlike most of the SWI/SNF complex proteins, this protein has no yeast counterpart. SMARCE1 is a component of SWI/SNF chromatin remodeling complexes that carry out key enzymatic activities, changing chromatin structure by altering DNA-histone contacts within a nucleosome in an ATP-dependent manner. SMARCE1 belongs to the neural progenitors-specific chromatin remodeling complex (npBAF complex) and the neuron-specific chromatin remodeling complex (nBAF complex). SMARCE1 is required for the coactivation of estrogen responsive promoters by SWI/SNF complexes and the SRC/p160 family of histone acetyltransferases (HATs). SMARCE1 also specifically interacts with the CoREST corepressor resulting in repression of neuronal specific gene promoters in non-neuronal cells. Human SMARCE1 protein has 411 amino acids and a molecular mass of 46649 Da. SMARCE1 interacts with BRDT, and also binds to the SRC/p160 family of histone acetyltransferases (HATs) composed of NCOA1, NCOA2, and NCOA3. SMARCE1 interacts with RCOR1/CoREST, NR3C1 and ZMIM2/ZIMP7.

[0083] The term “SMARCE1” is intended to include fragments, variants (e.g., allelic variants), and derivatives thereof. Representative human SMARCE1 cDNA and human SMARCE1 protein sequences are well-known in the art and are publicly available from the National Center for Biotechnology Information (NCBI). For example, human SMARCE1 protein (NP_003070.3) is encodable by transcript (NM_003079.4). Nucleic acid and polypeptide sequences of SMARCE1 orthologs in organisms other than humans are well known and include, for example, chimpanzee SMARCE1 (XM_009432223.3 and XP_009430498.1, XM_511478.7 and XP_511478.2, XM_009432222.3 and XP_009430497.1, and XM_001169953.6 and XP_001169953.1), Rhesus monkey SMARCE1 (NM_001261306.1 and NP_001248235.1), cattle SMARCE1 (NM_001099116.2 and NP_001092586.1), mouse SMARCE1 (NM_020618.4 and NP_065643.1), rat SMARCE1 (NM_001024993.1 and NP_001020164.1), chicken SMARCE1 (NM_001006335.2 and NP_001006335.2), tropical clawed frog SMARCE1 (NM_001005436.1 and NP_001005436.1), and zebrafish SMARCE1 (NM_201298.1 and NP_958455.2). Representative sequences of SMARCE1 orthologs are presented below in Table 1.

[0084] Anti-SMARCE1 antibodies suitable for detecting SMARCE1 protein are well-known in the art and include, for example, antibody TA335790 (Origene), antibodies NBP1-90012 and NB100-2591 (Novus Biologicals, Littleton, CO), antibodies ab131328, ab228750, and ab137081 (AbCam, Cambridge, MA), antibody Cat #PA5-18185 (ThermoFisher Scientific), antibody Cat #57-670 (ProSci, Poway, CA), etc. In addition, reagents are well-known for detecting SMARCE1. A clinical test of SMARCE1 for hereditary disese is available with the test ID no. GTR000558444.1 in NIH Genetic Testing Registry (GTR®), offered by Tempus Labs, Inc., (Chicago, IL). Moreover, mutilple siRNA, shRNA, CRISPR constructs for reducing SMARCE1 expression can be found in the commercial product lists of the above-referenced companies, such as siRNA products #sc-45940 and sc-45941 and CRISPR product #sc-404713 from Santa Cruz Biotechnology, RNAi products SR304479 and TL309242, and CRISPR product KN217885 (Origene), and multiple CRISPR products from GenScript (Piscataway, NJ). It is to be noted that the term can further be used to refer to any combination of features described herein regarding SMARCE1 molecules. For example, any combination of sequence composition, percentage identify, sequence length, domain structure, functional activity, etc. can be used to describe a SMARCE1 molecule encompassed by the present invention.

[0085] The term “DPF1” refers to Double PHD Fingers 1. DPF1 has an important role in developing neurons by participating in regulation of cell survival, possibly as a neurospecific transcription factor. DPF1 belongs to the neuron-specific chromatin remodeling complex (nBAF complex). During neural development a switch from a stem/progenitor to a post-mitotic chromatin remodeling mechanism occurs as neurons exit the cell cycle and become committed to their adult state. The transition from proliferating neural stem/progenitor cells to post-mitotic neurons requires a switch in subunit composition of the npBAF and nBAF complexes. As neural progenitors exit mitosis and differentiate into neurons, npBAF complexes which contain ACTL6A/BAF53A and PHF10/BAF45A, are exchanged for homologous alternative ACTL6B/BAF53B and DPF1/BAF45B or DPF3/BAF45C subunits in neuron-specific complexes (nBAF). The npBAF complex is essential for the self-renewal/proliferative capacity of the multipotent neural stem cells. The nBAF complex along with CREST plays a role regulating the activity of genes essential for dendrite growth. Human DPF1 protein has 380 amino acids and a molecular mass of 425029 Da. DPF1 is a component of neuron-specific chromatin remodeling complex (nBAF complex) composed of at least, ARID1A/BAF250A or ARID1B/BAF250B, SMARCD1/BAF60A, SMARCD3/BAF60C, SMARCA2/BRM/BAF190B, SMARCA4/BRG1/BAF190A, SMARCB1/BAF47, SMARCC1/BAF155, SMARCE1/BAF57, SMARCC2/BAF170, DPF1/BAF45B, DPF3/BAF45C, ACTL6B/BAF53B and actin.

[0086] The term “DPF1” is intended to include fragments, variants (e.g., allelic variants), and derivatives thereof. Representative human DPF1 cDNA and human DPF1 protein sequences are well-known in the art and are publicly available from the National Center for Biotechnology Information (NCBI). For example, five different human DPF1 isoforms are known. Human DPF1 isoform a (NP_001128627.1) is encodable by the transcript variant 1 (NM_001135155.2). Human DPF1 isoform b (NP_004638.2) is encodable by the transcript variant 2 (NM_004647.3). Human DPF1 isoform c (NP_001128628.1) is encodable by the transcript variant 3 (NM_001135156.2). Human DPF1 isoform d (NP_001276907.1) is encodable by the transcript variant 4 (NM_001289978.1). Human DPF1 isoform e (NP_001350508.1) is encodable by the transcript variant 5 (NM_001363579.1). Nucleic acid and polypeptide sequences of DPF1 orthologs in organisms other than humans are well known and include, for example, Rhesus monkey DPF1 (XM_015123830.1 and XP_014979316.1, XM_015123829.1 and XP_014979315.1, XM_015123835.1 and XP_014979321.1, XM_015123831.1 and XP_014979317.1, XM_015123833.1 and XP_014979319.1, and XM_015123832.1 and XP_014979318.1), cattle DPF1 (NM_001076855.1 and NP_001070323.1), mouse DPF1 (NM_013874.2 and NP_038902.1), rat DPF1 (NM_001105729.3 and NP_001099199.2), and tropical clawed frog DPF1 (NM_001097276.1 and NP_001090745.1). Representative sequences of DPF1 orthologs are presented below in Table 1.

[0087] Anti-DPF1 antibodies suitable for detecting DPF1 protein are well-known in the art and include, for example, antibody TA311193 (Origene), antibodies NBP2-13932 and NBP2-19518 (Novus Biologicals, Littleton, CO), antibodies ab199299, ab173160, and ab3940 (AbCam, Cambridge, MA), antibody Cat #PA5-61895 (ThermoFisher Scientific), antibody Cat #28-079 (ProSci, Poway, CA), etc. In addition, reagents are well-known for detecting DPF1. Moreover, mutilple siRNA, shRNA, CRISPR constructs for reducing DPF1 expression can be found in the commercial product lists of the above-referenced companies, such as siRNA products #sc-97084 and sc-143155 and CRISPR product #sc-409539 from Santa Cruz Biotechnology, RNAi products SR305389 and TL313388V, and CRISPR product KN213721 (Origene), and multiple CRISPR products from GenScript (Piscataway, NJ). It is to be noted that the term can further be used to refer to any combination of features described herein regarding DPF1 molecules. For example, any combination of sequence composition, percentage identify, sequence length, domain structure, functional activity, etc. can be used to describe a DPF1 molecule encompassed by the present invention.

[0088] The term “DPF2” refers to Double PHD Fingers 2. DPF2 protein is a member of the d4 domain family, characterized by a zinc finger-like structural motif. It functions as a transcription factor which is necessary for the apoptotic response following deprivation of survival factors. It likely serves a regulatory role in rapid hematopoietic cell growth and turnover. This gene is considered a candidate gene for multiple endocrine neoplasia type I, an inherited cancer syndrome involving multiple parathyroid, enteropancreatic, and pituitary tumors. DPF2 is a transcription factor required for the apoptosis response following survival factor withdrawal from myeloid cells. DPF2 also has a role in the development and maturation of lymphoid cells. Human DPF2 protein has 391 amino acids and a molecular mass of 44155 Da.

[0089] The term “DPF2” is intended to include fragments, variants (e.g., allelic variants), and derivatives thereof. Representative human DPF2 cDNA and human DPF2 protein sequences are well-known in the art and are publicly available from the National Center for Biotechnology Information (NCBI). For example, two different human DPF2 isoforms are known. Human DPF2 isoform 1 (NP_006259.1) is encodable by the transcript variant 1 (NM_006268.4). Human DPF2 isoform 2 (NP_001317237.1) is encodable by the transcript variant 2 (NM_001330308.1). Nucleic acid and polypeptide sequences of DPF2 orthologs in organisms other than humans are well known and include, for example, chimpanzee DPF2 (NM_001246651.1 and NP_001233580.1), Rhesus monkey DPF2 (XM_002808062.2 and XP_002808108.2, and XM_015113800.1 and XP_014969286.1), dog DPF2 (XM_861495.5 and XP_866588.1, and XM_005631484.3 and XP_005631541.1), cattle DPF2 (NM_001100356.1 and NP_001093826.1), mouse DPF2 (NM_001291078.1 and NP_001278007.1, and NM_011262.5 and NP_035392.1), rat DPF2 (NM_001108516.1 and NP_001101986.1), chicken DPF2 (NM_204331.1 and NP_989662.1), tropical clawed frog DPF2 (NM_001197172.2 and NP_001184101.1), and zebrafish DPF2 (NM_001007152.1 and NP_001007153.1). Representative sequences of DPF2 orthologs are presented below in Table 1.

[0090] Anti-DPF2 antibodies suitable for detecting DPF2 protein are well-known in the art and include, for example, antibody TA312307 (Origene), antibodies NBP1-76512 and NBP1-87138 (Novus Biologicals, Littleton, CO), antibodies ab134942, ab232327, and ab227095 (AbCam, Cambridge, MA), etc. In addition, reagents are well-known for detecting DPF2. A clinical test of DPF2 for hereditary disese is available with the test ID no. GTR000536833.2 in NIH Genetic Testing Registry (GTR®), offered by Fulgent Genetics Clinical Diagnostics Lab (Temple City, CA). Moreover, mutilple siRNA, shRNA, CRISPR constructs for reducing DPF2 expression can be found in the commercial product lists of the above-referenced companies, such as siRNA products #sc-97031 and sc-143156 and CRISPR product #sc-404801-KO-2 from Santa Cruz Biotechnology, RNAi products SR304035 and TL313387V, and CRISPR product KN202364 (Origene), and multiple CRISPR products from GenScript (Piscataway, NJ). It is to be noted that the term can further be used to refer to any combination of features described herein regarding DPF2 molecules. For example, any combination of sequence composition, percentage identify, sequence length, domain structure, functional activity, etc. can be used to describe a DPF2 molecule encompassed by the present invention.

[0091] The term “DPF3” refers to Double PHD Fingers 3, a member of the D4 protein family. The encoded protein is a transcription regulator that binds acetylated histones and is a component of the BAF chromatin remodeling complex. DPF3 belongs to the neuron-specific chromatin remodeling complex (nBAF complex). During neural development a switch from a stem/progenitor to a post-mitotic chromatin remodeling mechanism occurs as neurons exit the cell cycle and become committed to their adult state. The transition from proliferating neural stem/progenitor cells to post-mitotic neurons requires a switch in subunit composition of the npBAF and nBAF complexes. As neural progenitors exit mitosis and differentiate into neurons, npBAF complexes which contain ACTL6A/BAF53A and PHF10/BAF45A, are exchanged for homologous alternative ACTL6B/BAF53B and DPF1/BAF45B or DPF3/BAF45C subunits in neuron-specific complexes (nBAF). The npBAF complex is essential for the self-renewal/proliferative capacity of the multipotent neural stem cells. The nBAF complex along with CREST plays a role regulating the activity of genes essential for dendrite growth (By similarity). DPF3 is a muscle-specific component of the BAF complex, a multiprotein complex involved in transcriptional activation and repression of select genes by chromatin remodeling (alteration of DNA-nucleosome topology). DPF3 specifically binds acetylated lysines on histone 3 and 4 (H3K14ac, H3K9ac, H4K5ac, H4K8ac, H4K12ac, H4K16ac). In the complex, DPF3 acts as a tissue-specific anchor between histone acetylations and methylations and chromatin remodeling. DPF3 plays an essential role in heart and skeletal muscle development. Human DPF3 protein has 378 amino acids and a molecular mass of 43084 Da. The PHD-type zinc fingers of DPF3 mediate its binding to acetylated histones. DPF3 belongs to the requiem/DPF family.

[0092] The term “DPF3” is intended to include fragments, variants (e.g., allelic variants), and derivatives thereof. Representative human DPF3 cDNA and human DPF3 protein sequences are well-known in the art and are publicly available from the National Center for Biotechnology Information (NCBI). For example, four different human DPF3 isoforms are known. Human DPF3 isoform 1 (NP_036206.3) is encodable by the transcript variant 1 (NM_012074.4). Human DPF3 isoform 2 (NP_001267471.1) is encodable by the transcript variant 2 (NM_001280542.1). Human DPF3 isoform 3 (NP_001267472.1) is encodable by the transcript variant 3 (NM_001280543.1). Human DPF3 isoform 4 (NP_001267473.1) is encodable by the transcript variant 4 (NM_001280544.1). Nucleic acid and polypeptide sequences of DPF3 orthologs in organisms other than humans are well known and include, for example, chimpanzee DPF3 (XM_016926314.2 and XP_016781803.1, XM_016926316.2 and XP_016781805.1, and XM_016926315.2 and XP_016781804.1), dog DPF3 (XM_014116039.1 and XP_013971514.1), mouse DPF3 (NM_001267625.1 and NP_001254554.1, NM_001267626.1 and NP_001254555.1, and NM_058212.2 and NP_478119.1), chicken DPF3 (NM_204639.2 and NP_989970.1), tropical clawed frog DPF3 (NM_001278413.1 and NP_001265342.1), and zebrafish DPF3 (NM_001111169.1 and NP_001104639.1). Representative sequences of DPF3 orthologs are presented below in Table 1.

[0093] Anti-DPF3 antibodies suitable for detecting DPF3 protein are well-known in the art and include, for example, antibody TA335655 (Origene), antibodies NBP2-49494 and NBP2-14910 (Novus Biologicals, Littleton, CO), antibodies ab180914, ab127703, and ab85360 (AbCam, Cambridge, MA), antibody PA5-38011 (ThermoFisher Scientific), antibody Cat #7559 (ProSci, Poway, CA), etc. In addition, reagents are well-known for detecting DPF3. Moreover, mutilple siRNA, shRNA, CRISPR constructs for reducing DPF3 expression can be found in the commercial product lists of the above-referenced companies, such as siRNA products #sc-97031 and sc-92150 and CRISPR product #sc-143157 from Santa Cruz Biotechnology, RNAi products SR305368 and TL313386V, and CRISPR product KN218937 (Origene), and multiple CRISPR products from GenScript (Piscataway, NJ). It is to be noted that the term can further be used to refer to any combination of features described herein regarding DPF3 molecules. For example, any combination of sequence composition, percentage identify, sequence length, domain structure, functional activity, etc. can be used to describe a DPF3 molecule encompassed by the present invention.

[0094] The term “ACTL6A” refers to Actin Like 6A, a family member of actin-related proteins (ARPs), which share significant amino acid sequence identity to conventional actins. Both actins and ARPs have an actin fold, which is an ATP-binding cleft, as a common feature. The ARPs are involved in diverse cellular processes, including vesicular transport, spindle orientation, nuclear migration and chromatin remodeling. This gene encodes a 53 kDa subunit protein of the BAF (BRG1/brm-associated factor) complex in mammals, which is functionally related to SWI/SNF complex in S. cerevisiae and Drosophila; the latter is thought to facilitate transcriptional activation of specific genes by antagonizing chromatin-mediated transcriptional repression. Together with beta-actin, it is required for maximal ATPase activity of BRG1, and for the association of the BAF complex with chromatin/matrix. ACTL6A is a component of SWI/SNF chromatin remodeling complexes that carry out key enzymatic activities, changing chromatin structure by altering DNA-histone contacts within a nucleosome in an ATP-dependent manner. ACTL6A is required for maximal ATPase activity of SMARCA4/BRG1/BAF190A and for association of the SMARCA4/BRG1/BAF190A containing remodeling complex BAF with chromatin/nuclear matrix. ACTL6A belongs to the neural progenitors-specific chromatin remodeling complex (npBAF complex) and is required for the proliferation of neural progenitors. During neural development a switch from a stem/progenitor to a post-mitotic chromatin remodeling mechanism occurs as neurons exit the cell cycle and become committed to their adult state. The transition from proliferating neural stem/progenitor cells to post-mitotic neurons requires a switch in subunit composition of the npBAF and nBAF complexes. As neural progenitors exit mitosis and differentiate into neurons, npBAF complexes which contain ACTL6A/BAF53A and PHF10/BAF45A, are exchanged for homologous alternative ACTL6B/BAF53B and DPF1/BAF45B or DPF3/BAF45C subunits in neuron-specific complexes (nBAF). The npBAF complex is essential for the self-renewal/proliferative capacity of the multipotent neural stem cells. The nBAF complex along with CREST plays a role regulating the activity of genes essential for dendrite growth. ACTL6A is a component of the NuA4 histone acetyltransferase (HAT) complex which is involved in transcriptional activation of select genes principally by acetylation of nucleosomal histones H4 and H2A. This modification may both alter nucleosome—DNA interactions and promote interaction of the modified histones with other proteins which positively regulate transcription. This complex may be required for the activation of transcriptional programs associated with oncogene and proto-oncogene mediated growth induction, tumor suppressor mediated growth arrest and replicative senescence, apoptosis, and DNA repair. NuA4 may also play a direct role in DNA repair when recruited to sites of DNA damage. Putative core component of the chromatin remodeling IN080 complex which is involved in transcriptional regulation, DNA replication and probably DNA repair. Human ACTL6A protein has 429 amino acids and a molecular mass of 47461 Da.

[0095] The term “ACTL6A” is intended to include fragments, variants (e.g., allelic variants), and derivatives thereof. Representative human ACTL6A cDNA and human ACTL6A protein sequences are well-known in the art and are publicly available from the National Center for Biotechnology Information (NCBI). For example, two different human ACTL6A isoforms are known. Human ACTL6A isoform 1 (NP_004292.1) is encodable by the transcript variant 1 (NM_004301.4). Human ACTL6A isoform 2 (NP_817126.1 and NP_829888.1) is encodable by the transcript variant 2 (NM_177989.3) and transcript variant 3 (NM_178042.3). Nucleic acid and polypeptide sequences of ACTL6A orthologs in organisms other than humans are well known and include, for example, chimpanzee ACTL6A (NM_001271671.1 and NP_001258600.1), Rhesus monkey ACTL6A (NM_001104559.1 and NP_001098029.1), cattle ACTL6A (NM_001105035.1 and NP_001098505.1), mouse ACTL6A (NM_019673.2 and NP_062647.2), rat ACTL6A (NM_001039033.1 and NP_001034122.1), chicken ACTL6A (XM_422784.6 and XP_422784.3), tropical clawed frog ACTL6A (NM_204006.1 and NP_989337.1), and zebrafish ACTL6A (NM_173240.1 and NP_775347.1). Representative sequences of ACTL6A orthologs are presented below in Table 1.

[0096] Anti-ACTL6A antibodies suitable for detecting ACTL6A protein are well-known in the art and include, for example, antibody TA345058 (Origene), antibodies NB100-61628 and NBP2-55376 (Novus Biologicals, Littleton, CO), antibodies ab131272 and ab189315 (AbCam, Cambridge, MA), antibody 702414 (ThermoFisher Scientific), antibody Cat #45-314 (ProSci, Poway, CA), etc. In addition, reagents are well-known for detecting ACTL6A. Moreover, mutilple siRNA, shRNA, CRISPR constructs for reducing ACTL6A expression can be found in the commercial product lists of the above-referenced companies, such as siRNA products #sc-60239 and sc-60240 and CRISPR product #sc-403200-KO-2 from Santa Cruz Biotechnology, RNAi products SR300052 and TL306860V, and CRISPR product KN201689 (Origene), and multiple CRISPR products from GenScript (Piscataway, NJ). It is to be noted that the term can further be used to refer to any combination of features described herein regarding ACTL6A molecules. For example, any combination of sequence composition, percentage identify, sequence length, domain structure, functional activity, etc. can be used to describe an ACTL6A molecule encompassed by the present invention.

[0097] The term “β-Actin” refers to Actin Beta. This gene encodes one of six different actin proteins. Actins are highly conserved proteins that are involved in cell motility, structure, integrity, and intercellular signaling. The encoded protein is a major constituent of the contractile apparatus and one of the two nonmuscle cytoskeletal actins that are ubiquitously expressed. Mutations in this gene cause Baraitser-Winter syndrome 1, which is characterized by intellectual disability with a distinctive facial appearance in human patients. Numerous pseudogenes of this gene have been identified throughout the human genome. Actins are highly conserved proteins that are involved in various types of cell motility and are ubiquitously expressed in all eukaryotic cells. Actin is found in two main states: G-actin is the globular monomeric form, whereas F-actin forms helical polymers. Both G- and F-actin are intrinsically flexible structures. Human β-Actin protein has 375 amino acids and a molecular mass of 41737 Da. The binding partners of β-Actin include, e.g., CPNE1, CPNE4, DHX9, GCSAM, ERBB2, XPO6, and EMD.

[0098] The term “β-Actin” is intended to include fragments, variants (e.g., allelic variants), and derivatives thereof. Representative human β-Actin cDNA and human β-Actin protein sequences are well-known in the art and are publicly available from the National Center for Biotechnology Information (NCBI). For example, human β-Actin (NP_001092.1) is encodable by the transcript (NM_001101.4). Nucleic acid and polypeptide sequences of $3-Actin orthologs in organisms other than humans are well known and include, for example, chimpanzee β-Actin (NM_001009945.1 and NP_001009945.1), Rhesus monkey β-Actin (NM_001033084.1 and NP_001028256.1), dog β-Actin (NM_001195845.2 and NP_001182774.2), cattle β-Actin (NM_173979.3 and NP_776404.2), mouse β-Actin (NM_007393.5 and NP_031419.1), rat β-Actin (NM_031144.3 and NP_112406.1), chicken β-Actin (NM_205518.1 and NP_990849.1), and tropical clawed frog β-Actin (NM_213719.1 and NP_998884.1). Representative sequences of β-Actin orthologs are presented below in Table 1.

[0099] Anti-β-Actin antibodies suitable for detecting β-Actin protein are well-known in the art and include, for example, antibody TA353557 (Origene), antibodies NB600-501 and NB600-503 (Novus Biologicals, Littleton, CO), antibodies ab8226 and ab8227 (AbCam, Cambridge, MA), antibody AM4302 (ThermoFisher Scientific), antibody Cat #PM-7669-biotin (ProSci, Poway, CA), etc. In addition, reagents are well-known for detecting $-Actin. Moreover, mutilple siRNA, shRNA, CRISPR constructs for reducing β-Actin expression can be found in the commercial product lists of the above-referenced companies, such as siRNA products #sc-108069 and sc-108070 and CRISPR product #sc-400000-KO-2 from Santa Cruz Biotechnology, RNAi products SR300047 and TL314976V, and CRISPR product KN203643 (Origene), and multiple CRISPR products from GenScript (Piscataway, NJ). It is to be noted that the term can further be used to refer to any combination of features described herein regarding β-Actin molecules. For example, any combination of sequence composition, percentage identify, sequence length, domain structure, functional activity, etc. can be used to describe a β-Actin molecule encompassed by the present invention.

[0100] The term “BCL7A” refers to BCL Tumor Suppressor 7A. This gene is directly involved, with Myc and IgH, in a three-way gene translocation in a Burkitt lymphoma cell line. As a result of the gene translocation, the N-terminal region of the gene product is disrupted, which is thought to be related to the pathogenesis of a subset of high-grade B cell non-Hodgkin lymphoma. The N-terminal segment involved in the translocation includes the region that shares a strong sequence similarity with those of BCL7B and BCL7C. Diseases associated with BCL7A include Lymphoma and Burkitt Lymphoma. An important paralog of this gene is BCL7C. Human BCL7A protein has 210 amino acids and a molecular mass of 22810 Da.

[0101] The term “BCL7A” is intended to include fragments, variants (e.g., allelic variants), and derivatives thereof. Representative human BCL7A cDNA and human BCL7A protein sequences are well-known in the art and are publicly available from the National Center for Biotechnology Information (NCBI). For example, two different human BCL7A isoforms are known. Human BCL7A isoform a (NP_066273.1) is encodable by the transcript variant 1 (NM_020993.4). Human BCL7A isoform b (NP_001019979.1) is encodable by the transcript variant 2 (NM_001024808.2). Nucleic acid and polypeptide sequences of BCL7A orthologs in organisms other than humans are well known and include, for example, chimpanzee BCL7A (XM_009426452.3 and XP_009424727.2, and XM_016924434.2 and XP_016779923.1), Rhesus monkey BCL7A (XM_015153012.1 and XP_015008498.1, and XM_015153013.1 and XP_015008499.1), dog BCL7A (XM_543381.6 and XP_543381.2, and XM_854760.5 and XP_859853.1), cattle BCL7A (XM_024977701.1 and XP_024833469.1, and XM_024977700.1 and XP_024833468.1), mouse BCL7A (NM_029850.3 and NP_084126.1), rat BCL7A (XM_017598515.1 and XP_017454004.1), chicken BCL7A (XM_004945565.3 and XP_004945622.1, and XM_415148.6 and XP_415148.2), tropical clawed frog BCL7A (NM_001006871.1 and NP_001006872.1), and zebrafish BCL7A (NM_212560.1 and NP_997725.1). Representative sequences of BCL7A orthologs are presented below in Table 1.

[0102] Anti-BCL7A antibodies suitable for detecting BCL7A protein are well-known in the art and include, for example, antibody TA344744 (Origene), antibodies NBP1-30941 and NBP1-91696 (Novus Biologicals, Littleton, CO), antibodies ab137362 and ab1075 (AbCam, Cambridge, MA), antibody PA5-27123 (ThermoFisher Scientific), antibody Cat #45-325 (ProSci, Poway, CA), etc. In addition, reagents are well-known for detecting BCL7A. Multiple clinical tests of BCL7A are available in NIH Genetic Testing Registry (GTR®) (e.g., GTR Test ID: GTR000541481.2, offered by Fulgent Clinical Diagnostics Lab (Temple City, CA)). Moreover, mutilple siRNA, shRNA, CRISPR constructs for reducing BCL7A expression can be found in the commercial product lists of the above-referenced companies, such as siRNA products #sc-96136 and sc-141671 and CRISPR product #sc-410702 from Santa Cruz Biotechnology, RNAi products SR300417 and TL314490V, and CRISPR product KN210489 (Origene), and multiple CRISPR products from GenScript (Piscataway, NJ). It is to be noted that the term can further be used to refer to any combination of features described herein regarding BCL7A molecules. For example, any combination of sequence composition, percentage identify, sequence length, domain structure, functional activity, etc. can be used to describe a BCL7A molecule encompassed by the present invention.

[0103] The term “BCL7B” refers to BCL Tumor Suppressor 7B, a member of the BCL7 family including BCL7A, BCL7B and BCL7C proteins. This member is BCL7B, which contains a region that is highly similar to the N-terminal segment of BCL7A or BCL7C proteins. The BCL7A protein is encoded by the gene known to be directly involved in a three-way gene translocation in a Burkitt lymphoma cell line. This gene is located at a chromosomal region commonly deleted in Williams syndrome. This gene is highly conserved from C. elegans to human. BCL7B is a positive regulator of apoptosis. BCL7B plays a role in the Wnt signaling pathway, negatively regulating the expression of Wnt signaling components CTNNB1 and HMGA1 (Uehara et al. (2015) PLoS Genet 11(1):e1004921). BCL7B is involved in cell cycle progression, maintenance of the nuclear structure and stem cell differentiation (Uehara et al. (2015) PLoS Genet 11(1):e1004921). It plays a role in lung tumor development or progression. Human BCL7B protein has 202 amino acids and a molecular mass of 22195 Da.

[0104] The term “BCL7B” is intended to include fragments, variants (e.g., allelic variants), and derivatives thereof. Representative human BCL7B cDNA and human BCL7B protein sequences are well-known in the art and are publicly available from the National Center for Biotechnology Information (NCBI). For example, three different human BCL7B isoforms are known. Human BCL7B isoform 1 (NP_001698.2) is encodable by the transcript variant 1 (NM_001707.3). Human BCL7B isoform 2 (NP_001184173.1) is encodable by the transcript variant 2 (NM_001197244.1). Human BCL7B isoform 3 (NP_001287990.1) is encodable by the transcript variant 3 (NM_001301061.1). Nucleic acid and polypeptide sequences of BCL7B orthologs in organisms other than humans are well known and include, for example, chimpanzee BCL7B (XM_003318671.3 and XP_003318719.1, and XM_003318672.3 and XP_003318720.1), Rhesus monkey BCL7B (NM_001194509.1 and NP_001181438.1), dog BCL7B (XM_546926.6 and XP_546926.1, and XM_005620975.2 and XP_005621032.1), cattle BCL7B (NM_001034775.2 and NP_001029947.1), mouse BCL7B (NM_009745.2 and NP_033875.2), chicken BCL7B (XM_003643231.4 and XP_003643279.1, XM_004949975.3 and XP_004950032.1, and XM_025142155.1 and XP_024997923.1), tropical clawed frog BCL7B (NM_001103072.1 and NP_001096542.1), and zebrafish BCL7B (NM_001006018.1 and NP_001006018.1, and NM_213165.1 and NP_998330.1). Representative sequences of BCL7B orthologs are presented below in Table 1.

[0105] Anti-BCL7B antibodies suitable for detecting BCL7B protein are well-known in the art and include, for example, antibody TA809485 (Origene), antibodies H00009275-M01 and NBP2-34097 (Novus Biologicals, Littleton, CO), antibodies ab130538 and ab172358 (AbCam, Cambridge, MA), antibody MA527163 (ThermoFisher Scientific), antibody Cat #58-996 (ProSci, Poway, CA), etc. In addition, reagents are well-known for detecting BCL7B. Moreover, mutilple siRNA, shRNA, CRISPR constructs for reducing BCL7B expression can be found in the commercial product lists of the above-referenced companies, such as siRNA products #sc-89728 and sc-141672 and CRISPR product #sc-411262 from Santa Cruz Biotechnology, RNAi products SR306141 and TL306418V, and CRISPR product KN201696 (Origene), and multiple CRISPR products from GenScript (Piscataway, NJ). It is to be noted that the term can further be used to refer to any combination of features described herein regarding BCL7B molecules. For example, any combination of sequence composition, percentage identify, sequence length, domain structure, functional activity, etc. can be used to describe a BCL7B molecule encompassed by the present invention.

[0106] The term “BCL7C” refers to BCL Tumor Suppressor 7C, a member of the BCL7 family including BCL7A, BCL7B and BCL7C proteins. This gene is identified by the similarity of its product to the N-terminal region of BCL7A protein. BCL7C may play an anti-apoptotic role. Diseases associated with BCL7C include Lymphoma. Human BCL7C protein has 217 amino acids and a molecular mass of 23468 Da.

[0107] The term “BCL7C” is intended to include fragments, variants (e.g., allelic variants), and derivatives thereof. Representative human BCL7C cDNA and human BCL7C protein sequences are well-known in the art and are publicly available from the National Center for Biotechnology Information (NCBI). For example, two different human BCL7C isoforms are known. Human BCL7C isoform 1 (NP_001273455.1) is encodable by the transcript variant 1 (NM_001286526.1). Human BCL7C isoform 2 (NP_004756.2) is encodable by the transcript variant 2 (NM_004765.3). Nucleic acid and polypeptide sequences of BCL7C orthologs in organisms other than humans are well known and include, for example, chimpanzee BCL7C (XM_016929717.2 and XP_016785206.1, XM_016929716.2 and XP_016785205.1, and XM_016929718.2 and XP_016785207.1), Rhesus monkey BCL7C (NM_001265776.2 and NP_001252705.1), cattle BCL7C (NM_001099722.1 and NP_001093192.1), mouse BCL7C (NM_001347652.1 and NP_001334581.1, and NM_009746.2 and NP_033876.1), and rat BCL7C (NM_001106298.1 and NP_001099768.1). Representative sequences of BCL7C orthologs are presented below in Table 1.

[0108] Anti-BCL7C antibodies suitable for detecting BCL7C protein are well-known in the art and include, for example, antibody TA347083 (Origene), antibodies NBP2-15559 and NBP1-86441 (Novus Biologicals, Littleton, CO), antibodies ab126944 and ab231278 (AbCam, Cambridge, MA), antibody PA5-30308 (ThermoFisher Scientific), etc. In addition, reagents are well-known for detecting BCL7C. Multiple clinical tests of BCL7C are available in NIH Genetic Testing Registry (GTR®) (e.g., GTR Test ID: GTR000540637.2, offered by Fulgent Clinical Diagnostics Lab (Temple City, CA)). Moreover, mutilple siRNA, shRNA, CRISPR constructs for reducing BCL7C expression can be found in the commercial product lists of the above-referenced companies, such as siRNA products #sc-93022 and sc-141673 and CRISPR product #sc-411261 from Santa Cruz Biotechnology, RNAi products SR306140 and TL315552V, and CRISPR product KN205720 (Origene), and multiple CRISPR products from GenScript (Piscataway, NJ). It is to be noted that the term can further be used to refer to any combination of features described herein regarding BCL7C molecules. For example, any combination of sequence composition, percentage identify, sequence length, domain structure, functional activity, etc. can be used to describe a BCL7C molecule encompassed by the present invention.

[0109] The term “SMARCA4” refers to SWI/SNF related, matrix associated, actin dependent regulator of chromatin, subfamily a, member 4, a member of the SWI/SNF family of proteins and is highly similar to the brahma protein of Drosophila. Members of this family have helicase and ATPase activities and are thought to regulate transcription of certain genes by altering the chromatin structure around those genes. The encoded protein is part of the large ATP-dependent chromatin remodeling complex SNF/SWI, which is required for transcriptional activation of genes normally repressed by chromatin. In addition, this protein can bind BRCA1, as well as regulate the expression of the tumorigenic protein CD44. Mutations in this gene cause rhabdoid tumor predisposition syndrome type 2. SMARCA4 is a component of SWI/SNF chromatin remodeling complexes that carry out key enzymatic activities, changing chromatin structure by altering DNA-histone contacts within a nucleosome in an ATP-dependent manner. SMARCA4 is a component of the CREST-BRG1 complex, a multiprotein complex that regulates promoter activation by orchestrating a calcium-dependent release of a repressor complex and a recruitment of an activator complex. In resting neurons, transcription of the c-FOS promoter is inhibited by BRG1-dependent recruitment of a phospho-RB1-HDAC repressor complex. Upon calcium influx, RB1 is dephosphorylated by calcineurin, which leads to release of the repressor complex. At the same time, there is increased recruitment of CREBBP to the promoter by a CREST-dependent mechanism, which leads to transcriptional activation. The CREST-BRG1 complex also binds to the NR2B promoter, and activity-dependent induction of NR2B expression involves a release of HDAC1 and recruitment of CREBBP. SMARCA4 belongs to the neural progenitors-specific chromatin remodeling complex (npBAF complex) and the neuron-specific chromatin remodeling complex (nBAF complex). During neural development a switch from a stem/progenitor to a postmitotic chromatin remodeling mechanism occurs as neurons exit the cell cycle and become committed to their adult state. The transition from proliferating neural stem/progenitor cells to postmitotic neurons requires a switch in subunit composition of the npBAF and nBAF complexes. As neural progenitors exit mitosis and differentiate into neurons, npBAF complexes which contain ACTL6A/BAF53A and PHF10/BAF45A, are exchanged for homologous alternative ACTL6B/BAF53B and DPF1/BAF45B or DPF3/BAF45C subunits in neuron-specific complexes (nBAF). The npBAF complex is essential for the self-renewal/proliferative capacity of the multipotent neural stem cells. The nBAF complex along with CREST plays a role regulating the activity of genes essential for dendrite growth. SMARCA4/BAF190A promote neural stem cell self-renewal/proliferation by enhancing Notch-dependent proliferative signals, while concurrently making the neural stem cell insensitive to SHH-dependent differentiating cues. SMARCA4 acts as a corepressor of ZEB1 to regulate E-cadherin transcription and is required for induction of epithelial-mesenchymal transition (EMT) by ZEB1. Human SMARCA4 protein has 1647 amino acids and a molecular mass of 184646 Da. The known binding partners of SMARCA4 include, e.g., PHF10/BAF45A, MYOG, IKFZ1, ZEB1, NR3C1, PGR, SMARD1, TOPBP1 and ZMIM2/ZIMP7.

[0110] The term “SMARCA4” is intended to include fragments, variants (e.g., allelic variants), and derivatives thereof. Representative human SMARCA4 cDNA and human SMARCA4 protein sequences are well-known in the art and are publicly available from the National Center for Biotechnology Information (NCBI). For example, six different human SMARCA4 isoforms are known. Human SMARCA4 isoform A (NP_001122321.1) is encodable by the transcript variant 1 (NM_001128849.1). Human SMARCA4 isoform B (NP_001122316.1 and NP_003063.2) is encodable by the transcript variant 2 (NM_001128844.1) and the transcript variant 3 (NM_003072.3). Human SMARCA4 isoform C (NP_001122317.1) is encodable by the transcript variant 4 (NM_001128845.1). Human SMARCA4 isoform D (NP_001122318.1) is encodable by the transcript variant 5 (NM_001128846.1). Human SMARCA4 isoform E (NP_001122319.1) is encodable by the transcript variant 6 (NM_001128847.1). Human SMARCA4 isoform F (NP_001122320.1) is encodable by the transcript variant 7 (NM_001128848.1). Nucleic acid and polypeptide sequences of SMARCA4 orthologs in organisms other than humans are well known and include, for example, Rhesus monkey SMARCA4 (XM_015122901.1 and XP_014978387.1, XM_015122902.1 and XP_014978388.1, XM_015122903.1 and XP_014978389.1, XM_015122906.1 and XP_014978392.1, XM_015122905.1 and XP_014978391.1, XM_015122904.1 and XP_014978390.1, XM_015122907.1 and XP_014978393.1, XM_015122909.1 and XP_014978395.1, and XM_015122910.1 and XP_014978396.1), cattle SMARCA4 (NM_001105614.1 and NP_001099084.1), mouse SMARCA4 (NM_001174078.1 and NP_001167549.1, NM_011417.3 and NP 035547.2, NM_001174079.1 and NP_001167550.1, NM_001357764.1 and NP_001344693.1), rat SMARCA4 (NM_134368.1 and NP_599195.1), chicken SMARCA4 (NM_205059.1 and NP_990390.1), and zebrafish SMARCA4 (NM_181603.1 and NP_853634.1). Representative sequences of SMARCA4 orthologs are presented below in Table 1.

[0111] Anti-SMARCA4 antibodies suitable for detecting SMARCA4 protein are well-known in the art and include, for example, antibody AM26021PU-N(Origene), antibodies NB100-2594 and AF5738 (Novus Biologicals, Littleton, CO), antibodies ab110641 and ab4081 (AbCam, Cambridge, MA), antibody 720129 (ThermoFisher Scientific), antibody 7749 (ProSci), etc. In addition, reagents are well-known for detecting SMARCA4. Multiple clinical tests of SMARCA4 are available in NIH Genetic Testing Registry (GTR®) (e.g., GTR Test ID: GTR000517106.2, offered by Fulgent Clinical Diagnostics Lab (Temple City, CA)). Moreover, mutilple siRNA, shRNA, CRISPR constructs for reducing SMARCA4 expression can be found in the commercial product lists of the above-referenced companies, such as siRNA products #sc-29827 and sc-44287 and CRISPR product #sc-400168 from Santa Cruz Biotechnology, RNAi products SR321835 and TL309249V, and CRISPR product KN219258 (Origene), and multiple CRISPR products from GenScript (Piscataway, NJ). It is to be noted that the term can further be used to refer to any combination of features described herein regarding SMARCA4 molecules. For example, any combination of sequence composition, percentage identify, sequence length, domain structure, functional activity, etc. can be used to describe a SMARCA4 molecule encompassed by the present invention.

[0112] The term “SMARCE1” refers to SWI/SNF related, matrix associated, actin dependent regulator of chromatin subfamily E member 1. The protein encoded by this gene is part of the large ATP-dependent chromatin remodeling complex SWI/SNF, which is required for transcriptional activation of genes normally repressed by chromatin. The encoded protein, either alone or when in the SWI/SNF complex, can bind to 4-way junction DNA, which is thought to mimic the topology of DNA as it enters or exits the nucleosome. The protein contains a DNA-binding HMG domain, but disruption of this domain does not abolish the DNA-binding or nucleosome-displacement activities of the SWI/SNF complex. Unlike most of the SWI/SNF complex proteins, this protein has no yeast counterpart. SMARCE1 is a component of SWI/SNF chromatin remodeling complexes that carry out key enzymatic activities, changing chromatin structure by altering DNA-histone contacts within a nucleosome in an ATP-dependent manner. SMARCE1 belongs to the neural progenitors-specific chromatin remodeling complex (npBAF complex) and the neuron-specific chromatin remodeling complex (nBAF complex). SMARCE1 is required for the coactivation of estrogen responsive promoters by SWI/SNF complexes and the SRC/p160 family of histone acetyltransferases (HATs). SMARCE1 also specifically interacts with the CoREST corepressor resulting in repression of neuronal specific gene promoters in non-neuronal cells. Human SMARCE1 protein has 411 amino acids and a molecular mass of 46649 Da. SMARCE1 interacts with BRDT, and also binds to the SRC/p160 family of histone acetyltransferases (HATs) composed of NCOA1, NCOA2, and NCOA3. SMARCE1 interacts with RCOR1/CoREST, NR3C1 and ZMIM2/ZIMP7.

[0113] The term “SMARCE1” is intended to include fragments, variants (e.g., allelic variants), and derivatives thereof. Representative human SMARCE1 cDNA and human SMARCE1 protein sequences are well-known in the art and are publicly available from the National Center for Biotechnology Information (NCBI). For example, human SMARCE1 protein (NP_003070.3) is encodable by transcript (NM_003079.4). Nucleic acid and polypeptide sequences of SMARCE1 orthologs in organisms other than humans are well known and include, for example, chimpanzee SMARCE1 (XM_009432223.3 and XP_009430498.1, XM_511478.7 and XP_511478.2, XM_009432222.3 and XP_009430497.1, and XM_001169953.6 and XP_001169953.1), Rhesus monkey SMARCE1 (NM_001261306.1 and NP_001248235.1), cattle SMARCE1 (NM_001099116.2 and NP_001092586.1), mouse SMARCE1 (NM_020618.4 and NP_065643.1), rat SMARCE1 (NM_001024993.1 and NP_001020164.1), chicken SMARCE1 (NM_001006335.2 and NP_001006335.2), tropical clawed frog SMARCE1 (NM_001005436.1 and NP_001005436.1), and zebrafish SMARCE1 (NM_201298.1 and NP_958455.2). Representative sequences of SMARCE1 orthologs are presented below in Table 1.

[0114] Anti-SMARCE1 antibodies suitable for detecting SMARCE1 protein are well-known in the art and include, for example, antibody TA335790 (Origene), antibodies NBP1-90012 and NB100-2591 (Novus Biologicals, Littleton, CO), antibodies ab131328, ab228750, and ab137081 (AbCam, Cambridge, MA), antibody Cat #PA5-18185 (ThermoFisher Scientific), antibody Cat #57-670 (ProSci, Poway, CA), etc. In addition, reagents are well-known for detecting SMARCE1. A clinical test of SMARCE1 for hereditary disese is available with the test ID no. GTR000558444.1 in NIH Genetic Testing Registry (GTR®), offered by Tempus Labs, Inc., (Chicago, IL). Moreover, mutilple siRNA, shRNA, CRISPR constructs for reducing SMARCE1 expression can be found in the commercial product lists of the above-referenced companies, such as siRNA products #sc-45940 and sc-45941 and CRISPR product #sc-404713 from Santa Cruz Biotechnology, RNAi products SR304479 and TL309242, and CRISPR product KN217885 (Origene), and multiple CRISPR products from GenScript (Piscataway, NJ). It is to be noted that the term can further be used to refer to any combination of features described herein regarding SMARCE1 molecules. For example, any combination of sequence composition, percentage identify, sequence length, domain structure, functional activity, etc. can be used to describe a SMARCE1 molecule encompassed by the present invention.

[0115] The term “DPF1” refers to Double PHD Fingers 1. DPF1 has an important role in developing neurons by participating in regulation of cell survival, possibly as a neurospecific transcription factor. DPF1 belongs to the neuron-specific chromatin remodeling complex (nBAF complex). During neural development a switch from a stem/progenitor to a post-mitotic chromatin remodeling mechanism occurs as neurons exit the cell cycle and become committed to their adult state. The transition from proliferating neural stem/progenitor cells to post-mitotic neurons requires a switch in subunit composition of the npBAF and nBAF complexes. As neural progenitors exit mitosis and differentiate into neurons, npBAF complexes which contain ACTL6A/BAF53A and PHF10/BAF45A, are exchanged for homologous alternative ACTL6B/BAF53B and DPF1/BAF45B or DPF3/BAF45C subunits in neuron-specific complexes (nBAF). The npBAF complex is essential for the self-renewal/proliferative capacity of the multipotent neural stem cells. The nBAF complex along with CREST plays a role regulating the activity of genes essential for dendrite growth. Human DPF1 protein has 380 amino acids and a molecular mass of 425029 Da. DPF1 is a component of neuron-specific chromatin remodeling complex (nBAF complex) composed of at least, ARID1A/BAF250A or ARID1B/BAF250B, SMARCD1/BAF60A, SMARCD3/BAF60C, SMARCA2/BRM/BAF190B, SMARCA4/BRG1/BAF190A, SMARCB1/BAF47, SMARCC1/BAF155, SMARCE1/BAF57, SMARCC2/BAF170, DPF1/BAF45B, DPF3/BAF45C, ACTL6B/BAF53B and actin.

[0116] The term “DPF1” is intended to include fragments, variants (e.g., allelic variants), and derivatives thereof. Representative human DPF1 cDNA and human DPF1 protein sequences are well-known in the art and are publicly available from the National Center for Biotechnology Information (NCBI). For example, five different human DPF1 isoforms are known. Human DPF1 isoform a (NP_001128627.1) is encodable by the transcript variant 1 (NM_001135155.2). Human DPF1 isoform b (NP_004638.2) is encodable by the transcript variant 2 (NM_004647.3). Human DPF1 isoform c (NP_001128628.1) is encodable by the transcript variant 3 (NM_001135156.2). Human DPF1 isoform d (NP_001276907.1) is encodable by the transcript variant 4 (NM_001289978.1). Human DPF1 isoform e (NP_001350508.1) is encodable by the transcript variant 5 (NM_001363579.1). Nucleic acid and polypeptide sequences of DPF1 orthologs in organisms other than humans are well known and include, for example, Rhesus monkey DPF1 (XM_015123830.1 and XP_014979316.1, XM_015123829.1 and XP_014979315.1, XM_015123835.1 and XP_014979321.1, XM_015123831.1 and XP_014979317.1, XM_015123833.1 and XP_014979319.1, and XM_015123832.1 and XP_014979318.1), cattle DPF1 (NM_001076855.1 and NP_001070323.1), mouse DPF1 (NM_013874.2 and NP_038902.1), rat DPF1 (NM_001105729.3 and NP_001099199.2), and tropical clawed frog DPF1 (NM_001097276.1 and NP_001090745.1). Representative sequences of DPF1 orthologs are presented below in Table 1.

[0117] Anti-DPF1 antibodies suitable for detecting DPF1 protein are well-known in the art and include, for example, antibody TA311193 (Origene), antibodies NBP2-13932 and NBP2-19518 (Novus Biologicals, Littleton, CO), antibodies ab199299, ab173160, and ab3940 (AbCam, Cambridge, MA), antibody Cat #PA5-61895 (ThermoFisher Scientific), antibody Cat #28-079 (ProSci, Poway, CA), etc. In addition, reagents are well-known for detecting DPF1. Moreover, mutilple siRNA, shRNA, CRISPR constructs for reducing DPF1 expression can be found in the commercial product lists of the above-referenced companies, such as siRNA products #sc-97084 and sc-143155 and CRISPR product #sc-409539 from Santa Cruz Biotechnology, RNAi products SR305389 and TL313388V, and CRISPR product KN213721 (Origene), and multiple CRISPR products from GenScript (Piscataway, NJ). It is to be noted that the term can further be used to refer to any combination of features described herein regarding DPF1 molecules. For example, any combination of sequence composition, percentage identify, sequence length, domain structure, functional activity, etc. can be used to describe a DPF1 molecule encompassed by the present invention.

[0118] The term “DPF2” refers to Double PHD Fingers 2. DPF2 protein is a member of the d4 domain family, characterized by a zinc finger-like structural motif. It functions as a transcription factor which is necessary for the apoptotic response following deprivation of survival factors. It likely serves a regulatory role in rapid hematopoietic cell growth and turnover. This gene is considered a candidate gene for multiple endocrine neoplasia type I, an inherited cancer syndrome involving multiple parathyroid, enteropancreatic, and pituitary tumors. DPF2 is a transcription factor required for the apoptosis response following survival factor withdrawal from myeloid cells. DPF2 also has a role in the development and maturation of lymphoid cells. Human DPF2 protein has 391 amino acids and a molecular mass of 44155 Da.

[0119] The term “DPF2” is intended to include fragments, variants (e.g., allelic variants), and derivatives thereof. Representative human DPF2 cDNA and human DPF2 protein sequences are well-known in the art and are publicly available from the National Center for Biotechnology Information (NCBI). For example, two different human DPF2 isoforms are known. Human DPF2 isoform 1 (NP_006259.1) is encodable by the transcript variant 1 (NM_006268.4). Human DPF2 isoform 2 (NP_001317237.1) is encodable by the transcript variant 2 (NM_001330308.1). Nucleic acid and polypeptide sequences of DPF2 orthologs in organisms other than humans are well known and include, for example, chimpanzee DPF2 (NM_001246651.1 and NP_001233580.1), Rhesus monkey DPF2 (XM_002808062.2 and XP_002808108.2, and XM_015113800.1 and XP_014969286.1), dog DPF2 (XM_861495.5 and XP_866588.1, and XM_005631484.3 and XP_005631541.1), cattle DPF2 (NM_001100356.1 and NP_001093826.1), mouse DPF2 (NM_001291078.1 and NP_001278007.1, and NM_011262.5 and NP_035392.1), rat DPF2 (NM_001108516.1 and NP_001101986.1), chicken DPF2 (NM_204331.1 and NP_989662.1), tropical clawed frog DPF2 (NM_001197172.2 and NP_001184101.1), and zebrafish DPF2 (NM_001007152.1 and NP_001007153.1). Representative sequences of DPF2 orthologs are presented below in Table 1.

[0120] Anti-DPF2 antibodies suitable for detecting DPF2 protein are well-known in the art and include, for example, antibody TA312307 (Origene), antibodies NBP1-76512 and NBP1-87138 (Novus Biologicals, Littleton, CO), antibodies ab134942, ab232327, and ab227095 (AbCam, Cambridge, MA), etc. In addition, reagents are well-known for detecting DPF2. A clinical test of DPF2 for hereditary disese is available with the test ID no. GTR000536833.2 in NIH Genetic Testing Registry (GTR®), offered by Fulgent Genetics Clinical Diagnostics Lab (Temple City, CA). Moreover, mutilple siRNA, shRNA, CRISPR constructs for reducing DPF2 expression can be found in the commercial product lists of the above-referenced companies, such as siRNA products #sc-97031 and sc-143156 and CRISPR product #sc-404801-KO-2 from Santa Cruz Biotechnology, RNAi products SR304035 and TL313387V, and CRISPR product KN202364 (Origene), and multiple CRISPR products from GenScript (Piscataway, NJ). It is to be noted that the term can further be used to refer to any combination of features described herein regarding DPF2 molecules. For example, any combination of sequence composition, percentage identify, sequence length, domain structure, functional activity, etc. can be used to describe a DPF2 molecule encompassed by the present invention.

[0121] The term “DPF3” refers to Double PHD Fingers 3, a member of the D4 protein family. The encoded protein is a transcription regulator that binds acetylated histones and is a component of the BAF chromatin remodeling complex. DPF3 belongs to the neuron-specific chromatin remodeling complex (nBAF complex). During neural development a switch from a stem/progenitor to a post-mitotic chromatin remodeling mechanism occurs as neurons exit the cell cycle and become committed to their adult state. The transition from proliferating neural stem/progenitor cells to post-mitotic neurons requires a switch in subunit composition of the npBAF and nBAF complexes. As neural progenitors exit mitosis and differentiate into neurons, npBAF complexes which contain ACTL6A/BAF53A and PHF10/BAF45A, are exchanged for homologous alternative ACTL6B/BAF53B and DPF1/BAF45B or DPF3/BAF45C subunits in neuron-specific complexes (nBAF). The npBAF complex is essential for the self-renewal/proliferative capacity of the multipotent neural stem cells. The nBAF complex along with CREST plays a role regulating the activity of genes essential for dendrite growth (By similarity). DPF3 is a muscle-specific component of the BAF complex, a multiprotein complex involved in transcriptional activation and repression of select genes by chromatin remodeling (alteration of DNA-nucleosome topology). DPF3 specifically binds acetylated lysines on histone 3 and 4 (H3K14ac, H3K9ac, H4K5ac, H4K8ac, H4K12ac, H4K16ac). In the complex, DPF3 acts as a tissue-specific anchor between histone acetylations and methylations and chromatin remodeling. DPF3 plays an essential role in heart and skeletal muscle development. Human DPF3 protein has 378 amino acids and a molecular mass of 43084 Da. The PHD-type zinc fingers of DPF3 mediate its binding to acetylated histones. DPF3 belongs to the requiem/DPF family.

[0122] The term “DPF3” is intended to include fragments, variants (e.g., allelic variants), and derivatives thereof. Representative human DPF3 cDNA and human DPF3 protein sequences are well-known in the art and are publicly available from the National Center for Biotechnology Information (NCBI). For example, four different human DPF3 isoforms are known. Human DPF3 isoform 1 (NP_036206.3) is encodable by the transcript variant 1 (NM_012074.4). Human DPF3 isoform 2 (NP_001267471.1) is encodable by the transcript variant 2 (NM_001280542.1). Human DPF3 isoform 3 (NP_001267472.1) is encodable by the transcript variant 3 (NM_001280543.1). Human DPF3 isoform 4 (NP_001267473.1) is encodable by the transcript variant 4 (NM_001280544.1). Nucleic acid and polypeptide sequences of DPF3 orthologs in organisms other than humans are well known and include, for example, chimpanzee DPF3 (XM_016926314.2 and XP_016781803.1, XM_016926316.2 and XP_016781805.1, and XM_016926315.2 and XP_016781804.1), dog DPF3 (XM_014116039.1 and XP_013971514.1), mouse DPF3 (NM_001267625.1 and NP_001254554.1, NM_001267626.1 and NP_001254555.1, and NM_058212.2 and NP_478119.1), chicken DPF3 (NM_204639.2 and NP_989970.1), tropical clawed frog DPF3 (NM_001278413.1 and NP_001265342.1), and zebrafish DPF3 (NM_001111169.1 and NP_001104639.1). Representative sequences of DPF3 orthologs are presented below in Table 1.

[0123] Anti-DPF3 antibodies suitable for detecting DPF3 protein are well-known in the art and include, for example, antibody TA335655 (Origene), antibodies NBP2-49494 and NBP2-14910 (Novus Biologicals, Littleton, CO), antibodies ab180914, ab127703, and ab85360 (AbCam, Cambridge, MA), antibody PA5-38011 (ThermoFisher Scientific), antibody Cat #7559 (ProSci, Poway, CA), etc. In addition, reagents are well-known for detecting DPF3. Moreover, mutilple siRNA, shRNA, CRISPR constructs for reducing DPF3 expression can be found in the commercial product lists of the above-referenced companies, such as siRNA products #sc-97031 and sc-92150 and CRISPR product #sc-143157 from Santa Cruz Biotechnology, RNAi products SR305368 and TL313386V, and CRISPR product KN218937 (Origene), and multiple CRISPR products from GenScript (Piscataway, NJ). It is to be noted that the term can further be used to refer to any combination of features described herein regarding DPF3 molecules. For example, any combination of sequence composition, percentage identify, sequence length, domain structure, functional activity, etc. can be used to describe a DPF3 molecule encompassed by the present invention.

[0124] The term “ACTL6A” refers to Actin Like 6A, a family member of actin-related proteins (ARPs), which share significant amino acid sequence identity to conventional actins. Both actins and ARPs have an actin fold, which is an ATP-binding cleft, as a common feature. The ARPs are involved in diverse cellular processes, including vesicular transport, spindle orientation, nuclear migration and chromatin remodeling. This gene encodes a 53 kDa subunit protein of the BAF (BRG1/brm-associated factor) complex in mammals, which is functionally related to SWI/SNF complex in S. cerevisiae and Drosophila; the latter is thought to facilitate transcriptional activation of specific genes by antagonizing chromatin-mediated transcriptional repression. Together with beta-actin, it is required for maximal ATPase activity of BRG1, and for the association of the BAF complex with chromatin/matrix. ACTL6A is a component of SWI/SNF chromatin remodeling complexes that carry out key enzymatic activities, changing chromatin structure by altering DNA-histone contacts within a nucleosome in an ATP-dependent manner. ACTL6A is required for maximal ATPase activity of SMARCA4/BRG1/BAF190A and for association of the SMARCA4/BRG1/BAF190A containing remodeling complex BAF with chromatin/nuclear matrix. ACTL6A belongs to the neural progenitors-specific chromatin remodeling complex (npBAF complex) and is required for the proliferation of neural progenitors. During neural development a switch from a stem/progenitor to a post-mitotic chromatin remodeling mechanism occurs as neurons exit the cell cycle and become committed to their adult state. The transition from proliferating neural stem/progenitor cells to post-mitotic neurons requires a switch in subunit composition of the npBAF and nBAF complexes. As neural progenitors exit mitosis and differentiate into neurons, npBAF complexes which contain ACTL6A/BAF53A and PHF10/BAF45A, are exchanged for homologous alternative ACTL6B/BAF53B and DPF1/BAF45B or DPF3/BAF45C subunits in neuron-specific complexes (nBAF). The npBAF complex is essential for the self-renewal/proliferative capacity of the multipotent neural stem cells. The nBAF complex along with CREST plays a role regulating the activity of genes essential for dendrite growth. ACTL6A is a component of the NuA4 histone acetyltransferase (HAT) complex which is involved in transcriptional activation of select genes principally by acetylation of nucleosomal histones H4 and H2A. This modification may both alter nucleosome—DNA interactions and promote interaction of the modified histones with other proteins which positively regulate transcription. This complex may be required for the activation of transcriptional programs associated with oncogene and proto-oncogene mediated growth induction, tumor suppressor mediated growth arrest and replicative senescence, apoptosis, and DNA repair. NuA4 may also play a direct role in DNA repair when recruited to sites of DNA damage. Putative core component of the chromatin remodeling IN080 complex which is involved in transcriptional regulation, DNA replication and probably DNA repair. Human ACTL6A protein has 429 amino acids and a molecular mass of 47461 Da.

[0125] The term “ACTL6A” is intended to include fragments, variants (e.g., allelic variants), and derivatives thereof. Representative human ACTL6A cDNA and human ACTL6A protein sequences are well-known in the art and are publicly available from the National Center for Biotechnology Information (NCBI). For example, two different human ACTL6A isoforms are known. Human ACTL6A isoform 1 (NP_004292.1) is encodable by the transcript variant 1 (NM_004301.4). Human ACTL6A isoform 2 (NP_817126.1 and NP_829888.1) is encodable by the transcript variant 2 (NM_177989.3) and transcript variant 3 (NM_178042.3). Nucleic acid and polypeptide sequences of ACTL6A orthologs in organisms other than humans are well known and include, for example, chimpanzee ACTL6A (NM_001271671.1 and NP_001258600.1), Rhesus monkey ACTL6A (NM_001104559.1 and NP_001098029.1), cattle ACTL6A (NM_001105035.1 and NP_001098505.1), mouse ACTL6A (NM_019673.2 and NP_062647.2), rat ACTL6A (NM_001039033.1 and NP_001034122.1), chicken ACTL6A (XM_422784.6 and XP_422784.3), tropical clawed frog ACTL6A (NM_204006.1 and NP_989337.1), and zebrafish ACTL6A (NM_173240.1 and NP_775347.1). Representative sequences of ACTL6A orthologs are presented below in Table 1.

[0126] Anti-ACTL6A antibodies suitable for detecting ACTL6A protein are well-known in the art and include, for example, antibody TA345058 (Origene), antibodies NB100-61628 and NBP2-55376 (Novus Biologicals, Littleton, CO), antibodies ab131272 and ab189315 (AbCam, Cambridge, MA), antibody 702414 (ThermoFisher Scientific), antibody Cat #45-314 (ProSci, Poway, CA), etc. In addition, reagents are well-known for detecting ACTL6A. Moreover, mutilple siRNA, shRNA, CRISPR constructs for reducing ACTL6A expression can be found in the commercial product lists of the above-referenced companies, such as siRNA products #sc-60239 and sc-60240 and CRISPR product #sc-403200-KO-2 from Santa Cruz Biotechnology, RNAi products SR300052 and TL306860V, and CRISPR product KN201689 (Origene), and multiple CRISPR products from GenScript (Piscataway, NJ). It is to be noted that the term can further be used to refer to any combination of features described herein regarding ACTL6A molecules. For example, any combination of sequence composition, percentage identify, sequence length, domain structure, functional activity, etc. can be used to describe an ACTL6A molecule encompassed by the present invention.

[0127] The term “β-Actin” refers to Actin Beta. This gene encodes one of six different actin proteins. Actins are highly conserved proteins that are involved in cell motility, structure, integrity, and intercellular signaling. The encoded protein is a major constituent of the contractile apparatus and one of the two nonmuscle cytoskeletal actins that are ubiquitously expressed. Mutations in this gene cause Baraitser-Winter syndrome 1, which is characterized by intellectual disability with a distinctive facial appearance in human patients. Numerous pseudogenes of this gene have been identified throughout the human genome. Actins are highly conserved proteins that are involved in various types of cell motility and are ubiquitously expressed in all eukaryotic cells. Actin is found in two main states: G-actin is the globular monomeric form, whereas F-actin forms helical polymers. Both G- and F-actin are intrinsically flexible structures. Human β-Actin protein has 375 amino acids and a molecular mass of 41737 Da. The binding partners of β-Actin include, e.g., CPNE1, CPNE4, DHX9, GCSAM, ERBB2, XPO6, and EMD.

[0128] The term “β-Actin” is intended to include fragments, variants (e.g., allelic variants), and derivatives thereof. Representative human β-Actin cDNA and human β-Actin protein sequences are well-known in the art and are publicly available from the National Center for Biotechnology Information (NCBI). For example, human β-Actin (NP_001092.1) is encodable by the transcript (NM_001101.4). Nucleic acid and polypeptide sequences of $3-Actin orthologs in organisms other than humans are well known and include, for example, chimpanzee β-Actin (NM_001009945.1 and NP_001009945.1), Rhesus monkey β-Actin (NM_001033084.1 and NP_001028256.1), dog β-Actin (NM_001195845.2 and NP_001182774.2), cattle β-Actin (NM_173979.3 and NP_776404.2), mouse β-Actin (NM_007393.5 and NP_031419.1), rat β-Actin (NM_031144.3 and NP_112406.1), chicken β-Actin (NM_205518.1 and NP_990849.1), and tropical clawed frog β-Actin (NM_213719.1 and NP_998884.1). Representative sequences of β-Actin orthologs are presented below in Table 1.

[0129] Anti-β-Actin antibodies suitable for detecting β-Actin protein are well-known in the art and include, for example, antibody TA353557 (Origene), antibodies NB600-501 and NB600-503 (Novus Biologicals, Littleton, CO), antibodies ab8226 and ab8227 (AbCam, Cambridge, MA), antibody AM4302 (ThermoFisher Scientific), antibody Cat #PM-7669-biotin (ProSci, Poway, CA), etc. In addition, reagents are well-known for detecting $-Actin. Moreover, mutilple siRNA, shRNA, CRISPR constructs for reducing β-Actin expression can be found in the commercial product lists of the above-referenced companies, such as siRNA products #sc-108069 and sc-108070 and CRISPR product #sc-400000-KO-2 from Santa Cruz Biotechnology, RNAi products SR300047 and TL314976V, and CRISPR product KN203643 (Origene), and multiple CRISPR products from GenScript (Piscataway, NJ). It is to be noted that the term can further be used to refer to any combination of features described herein regarding β-Actin molecules. For example, any combination of sequence composition, percentage identify, sequence length, domain structure, functional activity, etc. can be used to describe a β-Actin molecule encompassed by the present invention.

[0130] The term “BCL7A” refers to BCL Tumor Suppressor 7A. This gene is directly involved, with Myc and IgH, in a three-way gene translocation in a Burkitt lymphoma cell line. As a result of the gene translocation, the N-terminal region of the gene product is disrupted, which is thought to be related to the pathogenesis of a subset of high-grade B cell non-Hodgkin lymphoma. The N-terminal segment involved in the translocation includes the region that shares a strong sequence similarity with those of BCL7B and BCL7C. Diseases associated with BCL7A include Lymphoma and Burkitt Lymphoma. An important paralog of this gene is BCL7C. Human BCL7A protein has 210 amino acids and a molecular mass of 22810 Da.

[0131] The term “BCL7A” is intended to include fragments, variants (e.g., allelic variants), and derivatives thereof. Representative human BCL7A cDNA and human BCL7A protein sequences are well-known in the art and are publicly available from the National Center for Biotechnology Information (NCBI). For example, two different human BCL7A isoforms are known. Human BCL7A isoform a (NP_066273.1) is encodable by the transcript variant 1 (NM_020993.4). Human BCL7A isoform b (NP_001019979.1) is encodable by the transcript variant 2 (NM_001024808.2). Nucleic acid and polypeptide sequences of BCL7A orthologs in organisms other than humans are well known and include, for example, chimpanzee BCL7A (XM_009426452.3 and XP_009424727.2, and XM_016924434.2 and XP_016779923.1), Rhesus monkey BCL7A (XM_015153012.1 and XP_015008498.1, and XM_015153013.1 and XP_015008499.1), dog BCL7A (XM_543381.6 and XP_543381.2, and XM_854760.5 and XP_859853.1), cattle BCL7A (XM_024977701.1 and XP_024833469.1, and XM_024977700.1 and XP_024833468.1), mouse BCL7A (NM_029850.3 and NP_084126.1), rat BCL7A (XM_017598515.1 and XP_017454004.1), chicken BCL7A (XM_004945565.3 and XP_004945622.1, and XM_415148.6 and XP_415148.2), tropical clawed frog BCL7A (NM_001006871.1 and NP_001006872.1), and zebrafish BCL7A (NM_212560.1 and NP_997725.1). Representative sequences of BCL7A orthologs are presented below in Table 1.

[0132] Anti-BCL7A antibodies suitable for detecting BCL7A protein are well-known in the art and include, for example, antibody TA344744 (Origene), antibodies NBP1-30941 and NBP1-91696 (Novus Biologicals, Littleton, CO), antibodies ab137362 and ab1075 (AbCam, Cambridge, MA), antibody PA5-27123 (ThermoFisher Scientific), antibody Cat #45-325 (ProSci, Poway, CA), etc. In addition, reagents are well-known for detecting BCL7A. Multiple clinical tests of BCL7A are available in NIH Genetic Testing Registry (GTR®) (e.g., GTR Test ID: GTR000541481.2, offered by Fulgent Clinical Diagnostics Lab (Temple City, CA)). Moreover, mutilple siRNA, shRNA, CRISPR constructs for reducing BCL7A expression can be found in the commercial product lists of the above-referenced companies, such as siRNA products #sc-96136 and sc-141671 and CRISPR product #sc-410702 from Santa Cruz Biotechnology, RNAi products SR300417 and TL314490V, and CRISPR product KN210489 (Origene), and multiple CRISPR products from GenScript (Piscataway, NJ). It is to be noted that the term can further be used to refer to any combination of features described herein regarding BCL7A molecules. For example, any combination of sequence composition, percentage identify, sequence length, domain structure, functional activity, etc. can be used to describe a BCL7A molecule encompassed by the present invention.

[0133] The term “BCL7B” refers to BCL Tumor Suppressor 7B, a member of the BCL7 family including BCL7A, BCL7B and BCL7C proteins. This member is BCL7B, which contains a region that is highly similar to the N-terminal segment of BCL7A or BCL7C proteins. The BCL7A protein is encoded by the gene known to be directly involved in a three-way gene translocation in a Burkitt lymphoma cell line. This gene is located at a chromosomal region commonly deleted in Williams syndrome. This gene is highly conserved from C. elegans to human. BCL7B is a positive regulator of apoptosis. BCL7B plays a role in the Wnt signaling pathway, negatively regulating the expression of Wnt signaling components CTNNB1 and HMGA1 (Uehara et al. (2015) PLoS Genet 11(1):e1004921). BCL7B is involved in cell cycle progression, maintenance of the nuclear structure and stem cell differentiation (Uehara et al. (2015) PLoS Genet 11(1):e1004921). It plays a role in lung tumor development or progression. Human BCL7B protein has 202 amino acids and a molecular mass of 22195 Da.

[0134] The term “BCL7B” is intended to include fragments, variants (e.g., allelic variants), and derivatives thereof. Representative human BCL7B cDNA and human BCL7B protein sequences are well-known in the art and are publicly available from the National Center for Biotechnology Information (NCBI). For example, three different human BCL7B isoforms are known. Human BCL7B isoform 1 (NP_001698.2) is encodable by the transcript variant 1 (NM_001707.3). Human BCL7B isoform 2 (NP_001184173.1) is encodable by the transcript variant 2 (NM_001197244.1). Human BCL7B isoform 3 (NP_001287990.1) is encodable by the transcript variant 3 (NM_001301061.1). Nucleic acid and polypeptide sequences of BCL7B orthologs in organisms other than humans are well known and include, for example, chimpanzee BCL7B (XM_003318671.3 and XP_003318719.1, and XM_003318672.3 and XP_003318720.1), Rhesus monkey BCL7B (NM_001194509.1 and NP_001181438.1), dog BCL7B (XM_546926.6 and XP_546926.1, and XM_005620975.2 and XP_005621032.1), cattle BCL7B (NM_001034775.2 and NP_001029947.1), mouse BCL7B (NM_009745.2 and NP_033875.2), chicken BCL7B (XM_003643231.4 and XP_003643279.1, XM_004949975.3 and XP_004950032.1, and XM_025142155.1 and XP_024997923.1), tropical clawed frog BCL7B (NM_001103072.1 and NP_001096542.1), and zebrafish BCL7B (NM_001006018.1 and NP_001006018.1, and NM_213165.1 and NP_998330.1). Representative sequences of BCL7B orthologs are presented below in Table 1.

[0135] Anti-BCL7B antibodies suitable for detecting BCL7B protein are well-known in the art and include, for example, antibody TA809485 (Origene), antibodies H00009275-MO1 and NBP2-34097 (Novus Biologicals, Littleton, CO), antibodies ab130538 and ab172358 (AbCam, Cambridge, MA), antibody MA527163 (ThermoFisher Scientific), antibody Cat #58-996 (ProSci, Poway, CA), etc. In addition, reagents are well-known for detecting BCL7B. Moreover, mutilple siRNA, shRNA, CRISPR constructs for reducing BCL7B expression can be found in the commercial product lists of the above-referenced companies, such as siRNA products #sc-89728 and sc-141672 and CRISPR product #sc-411262 from Santa Cruz Biotechnology, RNAi products SR306141 and TL306418V, and CRISPR product KN201696 (Origene), and multiple CRISPR products from GenScript (Piscataway, NJ). It is to be noted that the term can further be used to refer to any combination of features described herein regarding BCL7B molecules. For example, any combination of sequence composition, percentage identify, sequence length, domain structure, functional activity, etc. can be used to describe a BCL7B molecule encompassed by the present invention.

[0136] The term “BCL7C” refers to BCL Tumor Suppressor 7C, a member of the BCL7 family including BCL7A, BCL7B and BCL7C proteins. This gene is identified by the similarity of its product to the N-terminal region of BCL7A protein. BCL7C may play an anti-apoptotic role. Diseases associated with BCL7C include Lymphoma. Human BCL7C protein has 217 amino acids and a molecular mass of 23468 Da.

[0137] The term “BCL7C” is intended to include fragments, variants (e.g., allelic variants), and derivatives thereof. Representative human BCL7C cDNA and human BCL7C protein sequences are well-known in the art and are publicly available from the National Center for Biotechnology Information (NCBI). For example, two different human BCL7C isoforms are known. Human BCL7C isoform 1 (NP_001273455.1) is encodable by the transcript variant 1 (NM_001286526.1). Human BCL7C isoform 2 (NP_004756.2) is encodable by the transcript variant 2 (NM_004765.3). Nucleic acid and polypeptide sequences of BCL7C orthologs in organisms other than humans are well known and include, for example, chimpanzee BCL7C (XM_016929717.2 and XP_016785206.1, XM_016929716.2 and XP_016785205.1, and XM_016929718.2 and XP_016785207.1), Rhesus monkey BCL7C (NM_001265776.2 and NP_001252705.1), cattle BCL7C (NM_001099722.1 and NP_001093192.1), mouse BCL7C (NM_001347652.1 and NP_001334581.1, and NM_009746.2 and NP_033876.1), and rat BCL7C (NM_001106298.1 and NP_001099768.1). Representative sequences of BCL7C orthologs are presented below in Table 1.

[0138] Anti-BCL7C antibodies suitable for detecting BCL7C protein are well-known in the art and include, for example, antibody TA347083 (Origene), antibodies NBP2-15559 and NBP1-86441 (Novus Biologicals, Littleton, CO), antibodies ab126944 and ab231278 (AbCam, Cambridge, MA), antibody PA5-30308 (ThermoFisher Scientific), etc. In addition, reagents are well-known for detecting BCL7C. Multiple clinical tests of BCL7C are available in NIH Genetic Testing Registry (GTR®) (e.g., GTR Test ID: GTR000540637.2, offered by Fulgent Clinical Diagnostics Lab (Temple City, CA)). Moreover, mutilple siRNA, shRNA, CRISPR constructs for reducing BCL7C expression can be found in the commercial product lists of the above-referenced companies, such as siRNA products #sc-93022 and sc-141673 and CRISPR product #sc-411261 from Santa Cruz Biotechnology, RNAi products SR306140 and TL315552V, and CRISPR product KN205720 (Origene), and multiple CRISPR products from GenScript (Piscataway, NJ). It is to be noted that the term can further be used to refer to any combination of features described herein regarding BCL7C molecules. For example, any combination of sequence composition, percentage identify, sequence length, domain structure, functional activity, etc. can be used to describe a BCL7C molecule encompassed by the present invention.

[0139] The term “SMARCA4” refers to SWI/SNF related, matrix associated, actin dependent regulator of chromatin, subfamily a, member 4, a member of the SWI/SNF family of proteins and is highly similar to the brahma protein of Drosophila. Members of this family have helicase and ATPase activities and are thought to regulate transcription of certain genes by altering the chromatin structure around those genes. The encoded protein is part of the large ATP-dependent chromatin remodeling complex SNF/SWI, which is required for transcriptional activation of genes normally repressed by chromatin. In addition, this protein can bind BRCA1, as well as regulate the expression of the tumorigenic protein CD44. Mutations in this gene cause rhabdoid tumor predisposition syndrome type 2. SMARCA4 is a component of SWI/SNF chromatin remodeling complexes that carry out key enzymatic activities, changing chromatin structure by altering DNA-histone contacts within a nucleosome in an ATP-dependent manner. SMARCA4 is a component of the CREST-BRG1 complex, a multiprotein complex that regulates promoter activation by orchestrating a calcium-dependent release of a repressor complex and a recruitment of an activator complex. In resting neurons, transcription of the c-FOS promoter is inhibited by BRG1-dependent recruitment of a phospho-RB1-HDAC repressor complex. Upon calcium influx, RB1 is dephosphorylated by calcineurin, which leads to release of the repressor complex. At the same time, there is increased recruitment of CREBBP to the promoter by a CREST-dependent mechanism, which leads to transcriptional activation. The CREST-BRG1 complex also binds to the NR2B promoter, and activity-dependent induction of NR2B expression involves a release of HDAC1 and recruitment of CREBBP. SMARCA4 belongs to the neural progenitors-specific chromatin remodeling complex (npBAF complex) and the neuron-specific chromatin remodeling complex (nBAF complex). During neural development a switch from a stem/progenitor to a postmitotic chromatin remodeling mechanism occurs as neurons exit the cell cycle and become committed to their adult state. The transition from proliferating neural stem/progenitor cells to postmitotic neurons requires a switch in subunit composition of the npBAF and nBAF complexes. As neural progenitors exit mitosis and differentiate into neurons, npBAF complexes which contain ACTL6A/BAF53A and PHF10/BAF45A, are exchanged for homologous alternative ACTL6B/BAF53B and DPF1/BAF45B or DPF3/BAF45C subunits in neuron-specific complexes (nBAF). The npBAF complex is essential for the self-renewal/proliferative capacity of the multipotent neural stem cells. The nBAF complex along with CREST plays a role regulating the activity of genes essential for dendrite growth. SMARCA4/BAF190A promote neural stem cell self-renewal/proliferation by enhancing Notch-dependent proliferative signals, while concurrently making the neural stem cell insensitive to SHH-dependent differentiating cues. SMARCA4 acts as a corepressor of ZEB1 to regulate E-cadherin transcription and is required for induction of epithelial-mesenchymal transition (EMT) by ZEB1. Human SMARCA4 protein has 1647 amino acids and a molecular mass of 184646 Da. The known binding partners of SMARCA4 include, e.g., PHF10/BAF45A, MYOG, IKFZ1, ZEB1, NR3C1, PGR, SMARD1, TOPBP1 and ZMIM2/ZIMP7.

[0140] The term “SMARCA4” is intended to include fragments, variants (e.g., allelic variants), and derivatives thereof. Representative human SMARCA4 cDNA and human SMARCA4 protein sequences are well-known in the art and are publicly available from the National Center for Biotechnology Information (NCBI). For example, six different human SMARCA4 isoforms are known. Human SMARCA4 isoform A (NP_001122321.1) is encodable by the transcript variant 1 (NM_001128849.1). Human SMARCA4 isoform B (NP_001122316.1 and NP_003063.2) is encodable by the transcript variant 2 (NM_001128844.1) and the transcript variant 3 (NM_003072.3). Human SMARCA4 isoform C (NP_001122317.1) is encodable by the transcript variant 4 (NM_001128845.1). Human SMARCA4 isoform D (NP_001122318.1) is encodable by the transcript variant 5 (NM_001128846.1). Human SMARCA4 isoform E (NP_001122319.1) is encodable by the transcript variant 6 (NM_001128847.1). Human SMARCA4 isoform F (NP_001122320.1) is encodable by the transcript variant 7 (NM_001128848.1). Nucleic acid and polypeptide sequences of SMARCA4 orthologs in organisms other than humans are well known and include, for example, Rhesus monkey SMARCA4 (XM_015122901.1 and XP_014978387.1, XM_015122902.1 and XP_014978388.1, XM_015122903.1 and XP_014978389.1, XM_015122906.1 and XP_014978392.1, XM_015122905.1 and XP_014978391.1, XM_015122904.1 and XP_014978390.1, XM_015122907.1 and XP_014978393.1, XM_015122909.1 and XP_014978395.1, and XM_015122910.1 and XP_014978396.1), cattle SMARCA4 (NM_001105614.1 and NP_001099084.1), mouse SMARCA4 (NM_001174078.1 and NP_001167549.1, NM 011417.3 and NP_035547.2, NM_001174079.1 and NP_001167550.1, NM_001357764.1 and NP_001344693.1), rat SMARCA4 (NM_134368.1 and NP_599195.1), chicken SMARCA4 (NM_205059.1 and NP_990390.1), and zebrafish SMARCA4 (NM_181603.1 and NP_853634.1). Representative sequences of SMARCA4 orthologs are presented below in Table 1.

[0141] Anti-SMARCA4 antibodies suitable for detecting SMARCA4 protein are well-known in the art and include, for example, antibody AM26021PU-N(Origene), antibodies NB100-2594 and AF5738 (Novus Biologicals, Littleton, CO), antibodies ab110641 and ab4081 (AbCam, Cambridge, MA), antibody 720129 (ThermoFisher Scientific), antibody 7749 (ProSci), etc. In addition, reagents are well-known for detecting SMARCA4. Multiple clinical tests of SMARCA4 are available in NIH Genetic Testing Registry (GTR®) (e.g., GTR Test ID: GTR000517106.2, offered by Fulgent Clinical Diagnostics Lab (Temple City, CA)). Moreover, mutilple siRNA, shRNA, CRISPR constructs for reducing SMARCA4 expression can be found in the commercial product lists of the above-referenced companies, such as siRNA products #sc-29827 and sc-44287 and CRISPR product #sc-400168 from Santa Cruz Biotechnology, RNAi products SR321835 and TL309249V, and CRISPR product KN219258 (Origene), and multiple CRISPR products from GenScript (Piscataway, NJ). It is to be noted that the term can further be used to refer to any combination of features described herein regarding SMARCA4 molecules. For example, any combination of sequence composition, percentage identify, sequence length, domain structure, functional activity, etc. can be used to describe a SMARCA4 molecule encompassed by the present invention.

[0142] The term “SS18” refers to SS18, NBAF Chromatin Remodeling Complex Subunit. SS18 functions synergistically with RBM14 as a transcriptional coactivator. Isoform 1 and isoform 2 of SS18 function in nuclear receptor coactivation. Isoform 1 and isoform 2 of SS18 function in general transcriptional coactivation. Diseases associated with SS18 include Sarcoma, Synovial Cell Sarcoma. Among its related pathways are transcriptional misregulation in cancer and chromatin regulation/acetylation. Human SS18 protein has 418 amino acids and a molecular mass of 45929 Da. The known binding partners of SS18 include, e.g., MLLT10 and RBM14 isoform 1.

[0143] The term “SS18” is intended to include fragments, variants (e.g., allelic variants), and derivatives thereof. Representative human SS18 cDNA and human SS18 protein sequences are well-known in the art and are publicly available from the National Center for Biotechnology Information (NCBI). For example, three different human SS18 isoforms are known. Human SS18 isoform 1 (NP_001007560.1) is encodable by the transcript variant 1 (NM_001007559.2). Human SS18 isoform 2 (NP_005628.2) is encodable by the transcript variant 2 (NM_005637.3). Human SS18 isoform 3 (NP_001295130.1) is encodable by the transcript variant 3 (NM_001308201.1). Nucleic acid and polypeptide sequences of SS18 orthologs in organisms other than humans are well known and include, for example, dog SS18 (XM_005622940.3 and XP_005622997.1, XM_537295.6 and XP_537295.3, XM_003434925.4 and XP_003434973.1, and XM_005622941.3 and XP_005622998.1), mouse SS18 (NM_009280.2 and NP_033306.2, NM_001161369.1 and NP_001154841.1, NM_001161370.1 and NP_001154842.1, and NM_001161371.1 and NP_001154843.1), rat SS18 (NM_001100900.1 and NP_001094370.1), chicken SS18 (XM_015277943.2 and XP_015133429.1, and XM_015277944.2 and XP_015133430.1), tropical clawed frog SS18 (XM_012964966.1 and XP_012820420.1, XM_018094711.1 and XP_017950200.1, XM_012964964.2 and XP_012820418.1, and XM_012964965.2 and XP_012820419.1), and zebrafish SS18 (NM_001291325.1 and NP_001278254.1, and NM_199744.2 and NP_956038.1). Representative sequences of BRD7 orthologs are presented below in Table 1.

[0144] Anti-SS18 antibodies suitable for detecting SS18 protein are well-known in the art and include, for example, antibody TA314572 (Origene), antibodies NBP2-31777 and NBP2-31612 (Novus Biologicals, Littleton, CO), antibodies ab179927 and ab89086 (AbCam, Cambridge, MA), antibody PA5-63745 (ThermoFisher Scientific), etc. In addition, reagents are well-known for detecting SS18. Multiple clinical tests of SS18 are available in NIH Genetic Testing Registry (GTR®) (e.g., GTR Test ID: GTR000546059.2, offered by Fulgent Clinical Diagnostics Lab (Temple City, CA)). Moreover, mutilple siRNA, shRNA, CRISPR constructs for reducing SS18 expression can be found in the commercial product lists of the above-referenced companies, such as siRNA products #sc-38449 and sc-38450 and CRISPR product #sc-401575 from Santa Cruz Biotechnology, RNAi products SR304614 and TL309102V, and CRISPR product KN215192 (Origene), and multiple CRISPR products from GenScript (Piscataway, NJ). It is to be noted that the term can further be used to refer to any combination of features described herein regarding SS18 molecules. For example, any combination of sequence composition, percentage identify, sequence length, domain structure, functional activity, etc. can be used to describe a SS18 molecule encompassed by the present invention.

[0145] The term “SSX” refers to a family of highly homologous synovial sarcoma X (SSX) breakpoint proteins. The mammalian SSX family proteins include, e.g., human SSX1-9. These proteins can function as transcriptional repressors. They are also capable of eliciting spontaneous humoral and cellular immune responses in cancer patients, and are useful targets in cancer vaccine-based immunotherapy. SSX1, SSX2 and SSX4 family members, have been involved in t(X;18)(p11.2;q11.2) translocations that are characteristically found in all synovial sarcomas. This translocation results in the fusion of the synovial sarcoma translocation gene on chromosome 18 to one of the SSX genes on chromosome X. The encoded hybrid proteins are responsible for transforming activity. While some of the related SSX genes are involved in t(X;18)(p11.2;q11.2) translocations that are characteristically found in all synovial sarcomas, SSX3, SSX5, and SSX7 do not appear to be involved in such translocations. SSX6, or SSX6P is classified as a pseudogene because a splice donor in the 3′ UTR has changed compared to other family numbers, rendering the transcript a candidate for nonsense-mediated mRNA decay (NMD). SSX8, or SSX8P (SSX Family Member 8, Pseudogene) is a Pseudogene. SSX9, or SSX9P (SSX Family Member 9, Pseudogene) is a Pseudogene. SSX C-terminus comprises a 6-amino acid basic region and a 7-amino adic acidic region. The. representative basic regions and acidic regions for SSX1 to SSX9 are shown in FIG. 3D.

[0146] The term “SSX1” is intended to include fragments, variants (e.g., allelic variants), and derivatives thereof. Representative human SSX1 cDNA and human SSX1 protein sequences are well-known in the art and are publicly available from the National Center for Biotechnology Information (NCBI). For example, two different human SSX1 transcript variants are known. Human transcript variant 1 (NM_001278691.2) and human transcript variant 2 (NM_005635.4) encode the same human SSX1 protein (NP_001265620.1 and NP_005626.1). Transcript variant 1 represents the longer transcript. Transcript variant 2 differs in the 5′ UTR compared to variant 1. Nucleic acid and polypeptide sequences of SSX1 orthologs in organisms other than humans are well known and include, for example, monkey SS18 (XM_017854812.1 and XP_017710301.1), and chimpanzee SS18 (XM_016944028.1 and XP_016799517.1, XM_016944029.1 and XP_016799518.1, XM_016944031.1 and XP_016799520.1, and XM_016944030.1 and XP_016799519.1). A representative SSX1 has 188 amino acids with a molecular mass of 21931 Da. Representative sequences of SSX1 orthologs are presented below in Table 1.

[0147] Anti-SSX1 antibodies suitable for detecting SSX1 protein are well-known in the art and include, for example, antibodies CF502523 and CF502693 (Origene), antibodies NBP2-00614 and H00006756-MO1 (Novus Biologicals, Littleton, CO), antibodies ab206839 and ab234815 (AbCam, Cambridge, MA), antibody MA5-25511 (ThermoFisher Scientific), etc. In addition, reagents are well-known for detecting SSX1. Moreover, mutilple siRNA, shRNA, CRISPR constructs for reducing SSX1 expression can be found in the commercial product lists of the above-referenced companies, such as siRNA products #sc-44120 and sc-44120-SH and CRISPR product #sc-403551 from Santa Cruz Biotechnology, RNAi products SR304610 and TL309084, and CRISPR product KN401600 (Origene), and multiple CRISPR products from GenScript (Piscataway, NJ). It is to be noted that the term can further be used to refer to any combination of features described herein regarding SSX1 molecules. For example, any combination of sequence composition, percentage identify, sequence length, domain structure, functional activity, etc. can be used to describe a SSX1 molecule encompassed by the present invention.

[0148] The term “SSX2” is intended to include fragments, variants (e.g., allelic variants), and derivatives thereof. Representative human SSX2 cDNA and human SSX2 protein sequences are well-known in the art and are publicly available from the National Center for Biotechnology Information (NCBI). For example, three different human SSX2 transcript variants are known. Human SSX2 isoform 1 (NP_003138.3) is encodable by the transcript variant 1 (NM_003147.5). Human SSX2 isoform 2 (NP_783629.1) is encodable by the transcript variant 2 (NM_175698.2). Human SSX2 isoform 3 (NP_001265626.1) is encodable by the transcript variant 3 (NM_001278697.1). SSX2 has an identical duplicate, SSX2B (GeneID: 727837), located about 45 kb downstream in the opposite orientation on chromosome X. Three different human SSX2B transcript variants are known. Human SSX2B isoform 1 (NP_001265630.1) is encodable by the transcript variant 1 (NM_001278701.2). Human SSX2B isoform 2 (NP_001157889.1) is encodable by the transcript variant 2 (NM_001164417.3). Human SSX2B isoform 3 (NP_001265631.1) is encodable by the transcript variant 3 (NM_001278702.2). Nucleic acid and polypeptide sequences of SSX2 orthologs in organisms other than humans are well known. Representative sequences of SSX2 orthologs are presented below in Table 1.

[0149] Anti-SSX2 antibodies suitable for detecting SSX2 protein are well-known in the art and include, for example, antibodies CF500618 and CF500620 (Origene), antibodies NBP1-48008 and H00006757-MO1 (Novus Biologicals, Littleton, CO), antibodies ab236415 and ab48571 (AbCam, Cambridge, MA), antibody MA5-24971 (ThermoFisher Scientific), etc. In addition, reagents are well-known for detecting SSX2. Moreover, mutilple siRNA, shRNA, CRISPR constructs for reducing SSX2 expression can be found in the commercial product lists of the above-referenced companies, such as siRNA product #sc-38446 and CRISPR product #sc-417124 from Santa Cruz Biotechnology, RNAi products SR304611 and TL309083, and CRISPR product KN401214 (Origene), and multiple CRISPR products from GenScript (Piscataway, NJ). It is to be noted that the term can further be used to refer to any combination of features described herein regarding SSX2 molecules. For example, any combination of sequence composition, percentage identify, sequence length, domain structure, functional activity, etc. can be used to describe a SSX2 molecule encompassed by the present invention.

[0150] The term “SSX4” is intended to include fragments, variants (e.g., allelic variants), and derivatives thereof. Representative human SSX4 cDNA and human SSX4 protein sequences are well-known in the art and are publicly available from the National Center for Biotechnology Information (NCBI). For example, two different human SSX4 transcript variants are known. Human SSX4 isoform 1 (NP_005627.1) is encodable by the transcript variant 1 (NM_005636.4). Human SSX4 isoform 2 (NP_783856.1) is encodable by the transcript variant 2 (NM_175729.1). Chromosome Xp11 contains a segmental duplication resulting in two identical copies of synovial sarcoma, X breakpoint 4, SSX4 and SSX4B, in tail-to-tail orientation. Two different human SSX4B transcript variants are known. Human SSX4B isoform a (NP_001030004.1) is encodable by the transcript variant 1 (NM_001034832.3). Human SSX4B isoform 2 (NP_001035702.1) is encodable by the transcript variant 2 (NM_001040612.2). Nucleic acid and polypeptide sequences of SSX4 orthologs in organisms other than humans are well known, for example, dog putative protein SSX6-like (XM_005641306.2 and XP_005641363.1 and XM_022416309.1 and XP_022272017.1), cattle protein SSX1-like (XM_024988534.1 and XP_024844302.1), cattle synovial sarcoma, X breakpoint 5 (XM_024988283.1 and XP_024844051.1, and XM_024988284.1 and XP_024844052.1), and mouse synovial sarcoma, X member B, breakpoint 2 (NM_001001450.4 and NP_001001450.1, and NM_001134226.1 and NP_001127698.1). Representative sequences of SSX4 orthologs are presented below in Table 1.

[0151] Anti-SSX4 antibodies suitable for detecting SSX4 protein are well-known in the art and include, for example, antibodies TA339114 and TA339115 (Origene), antibodies H00006759-M02 and H00006759-B01P (Novus Biologicals, Littleton, CO), antibody ab172215 (AbCam, Cambridge, MA), antibody PA5-41117 (ThermoFisher Scientific), etc. In addition, reagents are well-known for detecting SSX4. Moreover, mutilple siRNA, shRNA, CRISPR constructs for reducing SSX4 expression can be found in the commercial product lists of the above-referenced companies, such as siRNA products #sc-106732 and sc-106800 and CRISPR product #sc-416410 from Santa Cruz Biotechnology, RNAi products SR304613 and TL309081, and CRISPR product KN422659 (Origene), and multiple CRISPR products from GenScript (Piscataway, NJ). It is to be noted that the term can further be used to refer to any combination of features described herein regarding SSX4 molecules. For example, any combination of sequence composition, percentage identify, sequence length, domain structure, functional activity, etc. can be used to describe a SSX4 molecule encompassed by the present invention.

[0152] The term “SSX3” is intended to include fragments, variants (e.g., allelic variants), and derivatives thereof. Representative human SSX3 cDNA and human SSX3 protein sequences are well-known in the art and are publicly available from the National Center for Biotechnology Information (NCBI). For example, Human SSX3 (NP_066294.1) is encodable by the transcript (NM_021014.4). Nucleic acid and polypeptide sequences of SSX3 orthologs in organisms other than humans are well known, for example, monkey SSX3 (XM_002806224.3 and XP_002806270.1). Representative sequences of SSX3 orthologs are presented below in Table 1.

[0153] Anti-SSX3 antibodies suitable for detecting SSX3 protein are well-known in the art and include, for example, antibody TA345316 (Origene), antibodies H00010214-M03 and H00010214-B01P (Novus Biologicals, Littleton, CO), antibody ab160884 (AbCam, Cambridge, MA), antibodies MA5-24431 and PA5-69016 (ThermoFisher Scientific), etc. In addition, reagents are well-known for detecting SSX3. Moreover, mutilple siRNA, shRNA, CRISPR constructs for reducing SSX3 expression can be found in the commercial product lists of the above-referenced companies, such as siRNA products #sc-38447 and sc-38447-SH and CRISPR product #sc-417585 from Santa Cruz Biotechnology, RNAi products SR306902 and TL301375, and CRISPR product KN403244 (Origene), and multiple CRISPR products from GenScript (Piscataway, NJ). It is to be noted that the term can further be used to refer to any combination of features described herein regarding SSX3 molecules. For example, any combination of sequence composition, percentage identify, sequence length, domain structure, functional activity, etc. can be used to describe a SSX3 molecule encompassed by the present invention.

[0154] The term “SSX5” is intended to include fragments, variants (e.g., allelic variants), and derivatives thereof. Representative human SSX5 cDNA and human SSX5 protein sequences are well-known in the art and are publicly available from the National Center for Biotechnology Information (NCBI). For example, two different human SSX5 transcript variants are known. Human SSX5 isoform 1 (NP_066295.3) is encodable by the transcript variant 1 (NM_021015.4). Human SSX5 isoform 2 (NP_783729.1) is encodable by the transcript variant 2 (NM_175723.1). Nucleic acid and polypeptide sequences of SSX5 orthologs in organisms other than humans are well known. Representative sequences of SSX5 orthologs are presented below in Table 1.

[0155] Anti-SSX5 antibodies suitable for detecting SSX5 protein are well-known in the art and include, for example, antibodies CF504221 and CF504223 (Origene), antibodies NBP2-01842 and H00006758-B01P (Novus Biologicals, Littleton, CO), antibodies PA5-92141 and MA5-25901 (ThermoFisher Scientific), etc. In addition, reagents are well-known for detecting SSX5. Moreover, mutilple siRNA, shRNA, CRISPR constructs for reducing SSX5 expression can be found in the commercial product lists of the above-referenced companies, such as siRNA products #sc-38448 and sc-38448-SH and CRISPR product #sc-403552 from Santa Cruz Biotechnology, RNAi products SR304612 and TL301374, and CRISPR product KN402208 (Origene), and multiple CRISPR products from GenScript (Piscataway, NJ). It is to be noted that the term can further be used to refer to any combination of features described herein regarding SSX5 molecules. For example, any combination of sequence composition, percentage identify, sequence length, domain structure, functional activity, etc. can be used to describe a SSX5 molecule encompassed by the present invention.

[0156] The term “SSX7” is intended to include fragments, variants (e.g., allelic variants), and derivatives thereof. Representative human SSX7 cDNA and human SSX7 protein sequences are well-known in the art and are publicly available from the National Center for Biotechnology Information (NCBI). For example, Human SSX7 (NP_775494.1) is encodable by the transcript (NM_173358.2). Nucleic acid and polypeptide sequences of SSX7 orthologs in organisms other than humans are well known. Representative sequences of SSX7 orthologs are presented below in Table 1.

[0157] Anti-SSX7 antibodies suitable for detecting SSX7 protein are well-known in the art and include, for example, antibody TA339916 (Origene), antibody NBP1-79468 (Novus Biologicals, Littleton, CO), antibody PA5-49262 (ThermoFisher Scientific), etc. In addition, reagents are well-known for detecting SSX7. Moreover, mutilple siRNA, shRNA, CRISPR constructs for reducing SSX7 expression can be found in the commercial product lists of the above-referenced companies, such as siRNA products #sc-106568 and sc-106568-SH and CRISPR product #sc-403553 from Santa Cruz Biotechnology, RNAi products SR316959 and TL301372, and CRISPR product KN413920 (Origene), and multiple CRISPR products from GenScript (Piscataway, NJ). It is to be noted that the term can further be used to refer to any combination of features described herein regarding SSX7 molecules. For example, any combination of sequence composition, percentage identify, sequence length, domain structure, functional activity, etc. can be used to describe a SSX7 molecule encompassed by the present invention.

[0158] The SS18-SSX fusion protein is formed by chromosomal translocation, which results in a fusion of SS18 protein with the C-terminal of the SSX family member (e.g., SSX1, SSX2, and SSX4). Many of these function as oncoproteins which play important roles in tumorgenesis. For example, the molecular hallmark of synovial sarcoma is a pathognomonic reciprocal translocation t(X;18)(p11; q11), leading to the fusion of SS18 (SYT) to one of the homologs SSX genes (most frequently SSX1 or SSX2, in rare cases SSX4), generating oncogenic SS18-SSX chimeric proteins. Representative sequences of SS18-SSX fusion proteins are presented below in Table 2.

[0159] Unless otherwise specified here within, the terms “antibody” and “antibodies” broadly encompass naturally-occurring forms of antibodies (e.g. IgG, IgA, IgM, IgE) and recombinant antibodies, such as single-chain antibodies, chimeric and humanized antibodies and multi-specific antibodies, as well as fragments and derivatives of all of the foregoing, which fragments and derivatives have at least an antigenic binding site. Antibody derivatives may comprise a protein or chemical moiety conjugated to an antibody.

[0160] In addition, intrabodies are well-known antigen-binding molecules having the characteristic of antibodies, but that are capable of being expressed within cells in order to bind and/or inhibit intracellular targets of interest (Chen et al. (1994) Human Gene Ther. 5:595-601). Methods are well-known in the art for adapting antibodies to target (e.g., inhibit) intracellular moieties, such as the use of single-chain antibodies (scFvs), modification of immunoglobulin VL domains for hyperstability, modification of antibodies to resist the reducing intracellular environment, generating fusion proteins that increase intracellular stability and/or modulate intracellular localization, and the like. Intracellular antibodies can also be introduced and expressed in one or more cells, tissues or organs of a multicellular organism, for example for prophylactic and/or therapeutic purposes (e.g., as a gene therapy) (see, at least PCT Publs. WO 08/020079, WO 94/02610, WO 95/22618, and WO 03/014960; U.S. Pat. No. 7,004,940; Cattaneo and Biocca (1997) Intracellular Antibodies: Development and Applications (Landes and Springer-Verlag publs.); Kontermann (2004) Methods 34:163-170; Cohen et al. (1998) Oncogene 17:2445-2456; Auf der Maur et al. (2001) FEBS Lett. 508:407-412; Shaki-Loewenstein et al. (2005) J. Immunol. Meth. 303:19-39).

[0161] The term “antibody” as used herein also includes an “antigen-binding portion” of an antibody (or simply “antibody portion”). The term “antigen-binding portion”, as used herein, refers to one or more fragments of an antibody that retain the ability to specifically bind to an antigen (e.g., a biomarker polypeptide or fragment thereof). It has been shown that the antigen-binding function of an antibody can be performed by fragments of a full-length antibody. Examples of binding fragments encompassed within the term “antigen-binding portion” of an antibody include (i) a Fab fragment, a monovalent fragment consisting of the VL, VH, CL and CHi domains; (ii) a F(ab′)₂ fragment, a bivalent fragment comprising two Fab fragments linked by a disulfide bridge at the hinge region; (iii) a Fd fragment consisting of the VH and CHi domains; (iv) a Fv fragment consisting of the VL and VH domains of a single arm of an antibody, (v) a dAb fragment (Ward et al., (1989) Nature 341:544-546), which consists of a VH domain; and (vi) an isolated complementarity determining region (CDR). Furthermore, although the two domains of the Fv fragment, VL and VH, are coded for by separate genes, they can be joined, using recombinant methods, by a synthetic linker that enables them to be made as a single protein chain in which the VL and VH regions pair to form monovalent polypeptides (known as single chain Fv (scFv); see e.g., Bird et al. (1988) Science 242:423-426; and Huston et al. (1988) Proc. Natl. Acad. Sci. USA 85:5879-5883; and Osbourn et al. 1998, Nature Biotechnology 16: 778). Such single chain antibodies are also intended to be encompassed within the term “antigen-binding portion” of an antibody. Any VH and VL sequences of specific scFv can be linked to human immunoglobulin constant region cDNA or genomic sequences, in order to generate expression vectors encoding complete IgG polypeptides or other isotypes. VH and VL can also be used in the generation of Fab, Fv or other fragments of immunoglobulins using either protein chemistry or recombinant DNA technology. Other forms of single chain antibodies, such as diabodies are also encompassed. Diabodies are bivalent, bispecific antibodies in which VH and VL domains are expressed on a single polypeptide chain, but using a linker that is too short to allow for pairing between the two domains on the same chain, thereby forcing the domains to pair with complementary domains of another chain and creating two antigen binding sites (see e.g., Holliger et al. (1993) Proc. Natl. Acad. Sci. U.S.A. 90:6444-6448; Poljak et al. (1994) Structure 2:1121-1123).

[0162] Still further, an antibody or antigen-binding portion thereof may be part of larger immunoadhesion polypeptides, formed by covalent or noncovalent association of the antibody or antibody portion with one or more other proteins or peptides. Examples of such immunoadhesion polypeptides include use of the streptavidin core region to make a tetrameric scFv polypeptide (Kipriyanov et al. (1995) Human Antibodies and Hybridomas 6:93-101) and use of a cysteine residue, biomarker peptide and a C-terminal polyhistidine tag to make bivalent and biotinylated scFv polypeptides (Kipriyanov et al. (1994) Mol. Immunol. 31:1047-1058). Antibody portions, such as Fab and F(ab′)₂ fragments, can be prepared from whole antibodies using conventional techniques, such as papain or pepsin digestion, respectively, of whole antibodies. Moreover, antibodies, antibody portions and immunoadhesion polypeptides can be obtained using standard recombinant DNA techniques, as described herein.

[0163] Antibodies may be polyclonal or monoclonal; xenogeneic, allogeneic, or syngeneic; or modified forms thereof (e.g. humanized, chimeric, etc.). Antibodies may also be fully human. Preferably, antibodies encompassed by the present invention bind specifically or substantially specifically to a biomarker polypeptide or fragment thereof. The terms “monoclonal antibodies” and “monoclonal antibody composition”, as used herein, refer to a population of antibody polypeptides that contain only one species of an antigen binding site capable of immunoreacting with a particular epitope of an antigen, whereas the term “polyclonal antibodies” and “polyclonal antibody composition” refer to a population of antibody polypeptides that contain multiple species of antigen binding sites capable of interacting with a particular antigen. A monoclonal antibody composition typically displays a single binding affinity for a particular antigen with which it immunoreacts.

[0164] Antibodies may also be “humanized,” which is intended to include antibodies made by a non-human cell having variable and constant regions which have been altered to more closely resemble antibodies that would be made by a human cell. For example, by altering the non-human antibody amino acid sequence to incorporate amino acids found in human germline immunoglobulin sequences. The humanized antibodies encompassed by the present invention may include amino acid residues not encoded by human germline immunoglobulin sequences (e.g., mutations introduced by random or site-specific mutagenesis in vitro or by somatic mutation in vivo), for example in the CDRs. The term “humanized antibody”, as used herein, also includes antibodies in which CDR sequences derived from the germline of another mammalian species, have been grafted onto human framework sequences.

[0165] The term “biomarker” refers to a measurable entity of the present invention that has been determined to be predictive of cancer therapy effects (e.g., SS18-SSX target genes described described herein, such as those in the tables, figures, examples, and otherwise described in the specification). Biomarkers can include, without limitation, nucleic acids (e.g., genomic nucleic acids and/or transcribed nucleic acids) and proteins. Many biomarkers are also useful as therapeutic targets.

[0166] A “blocking” antibody or an antibody “antagonist” is one which inhibits or reduces at least one biological activity of the antigen(s) it binds. In certain embodiments, the blocking antibodies or antagonist antibodies or fragments thereof described herein substantially or completely inhibit a given biological activity of the antigen(s).

[0167] The term “body fluid” refers to fluids that are excreted or secreted from the body as well as fluids that are normally not (e.g. amniotic fluid, aqueous humor, bile, blood and blood plasma, cerebrospinal fluid, cerumen and earwax, cowper's fluid or pre-ejaculatory fluid, chyle, chyme, stool, female ejaculate, interstitial fluid, intracellular fluid, lymph, menses, breast milk, mucus, pleural fluid, pus, saliva, sebum, semen, serum, sweat, synovial fluid, tears, urine, vaginal lubrication, vitreous humor, vomit).

[0168] The terms “cancer” or “tumor” or “hyperproliferative” refer to the presence of cells possessing characteristics typical of cancer-causing cells, such as uncontrolled proliferation, immortality, metastatic potential, rapid growth and proliferation rate, and certain characteristic morphological features. In some embodiments, such cells exhibit such characteristics in part or in full due to the expression and activity of SS18-SSX oncogenic fusion protein target genes.

[0169] Cancer cells are often in the form of a tumor, but such cells may exist alone within an animal, or may be a non-tumorigenic cancer cell, such as a leukemia cell. As used herein, the term “cancer” includes premalignant as well as malignant cancers. Cancers include, but are not limited to, B cell cancer, e.g., multiple myeloma, Waldenström's macroglobulinemia, the heavy chain diseases, such as, for example, alpha chain disease, gamma chain disease, and mu chain disease, benign monoclonal gammopathy, and immunocytic amyloidosis, melanomas, breast cancer, lung cancer, bronchus cancer, colorectal cancer, prostate cancer, pancreatic cancer, stomach cancer, ovarian cancer, urinary bladder cancer, brain or central nervous system cancer, peripheral nervous system cancer, esophageal cancer, cervical cancer, uterine or endometrial cancer, cancer of the oral cavity or pharynx, liver cancer, kidney cancer, testicular cancer, biliary tract cancer, small bowel or appendix cancer, salivary gland cancer, thyroid gland cancer, adrenal gland cancer, osteosarcoma, chondrosarcoma, cancer of hematologic tissues, and the like. Other non-limiting examples of types of cancers applicable to the methods encompassed by the present invention include human sarcomas and carcinomas, e.g., fibrosarcoma, myxosarcoma, liposarcoma, chondrosarcoma, osteogenic sarcoma, chordoma, angiosarcoma, endotheliosarcoma, lymphangiosarcoma, lymphangioendotheliosarcoma, synovioma, mesothelioma, Ewing's tumor, leiomyosarcoma, rhabdomyosarcoma, colon carcinoma, colorectal cancer, pancreatic cancer, breast cancer, ovarian cancer, prostate cancer, squamous cell carcinoma, basal cell carcinoma, adenocarcinoma, sweat gland carcinoma, sebaceous gland carcinoma, papillary carcinoma, papillary adenocarcinomas, cystadenocarcinoma, medullary carcinoma, bronchogenic carcinoma, renal cell carcinoma, hepatoma, bile duct carcinoma, liver cancer, choriocarcinoma, seminoma, embryonal carcinoma, Wilms' tumor, cervical cancer, bone cancer, brain tumor, testicular cancer, lung carcinoma, small cell lung carcinoma, bladder carcinoma, epithelial carcinoma, glioma, astrocytoma, medulloblastoma, craniopharyngioma, ependymoma, pinealoma, hemangioblastoma, acoustic neuroma, oligodendroglioma, meningioma, melanoma, neuroblastoma, retinoblastoma; leukemias, e.g., acute lymphocytic leukemia and acute myelocytic leukemia (myeloblastic, promyelocytic, myelomonocytic, monocytic and erythroleukemia); chronic leukemia (chronic myelocytic (granulocytic) leukemia and chronic lymphocytic leukemia); and polycythemia vera, lymphoma (Hodgkin's disease and non-Hodgkin's disease), multiple myeloma, Waldenstrom's macroglobulinemia, and heavy chain disease. In some embodiments, cancers are epithlelial in nature and include but are not limited to, bladder cancer, breast cancer, cervical cancer, colon cancer, gynecologic cancers, renal cancer, laryngeal cancer, lung cancer, oral cancer, head and neck cancer, ovarian cancer, pancreatic cancer, prostate cancer, or skin cancer. In other embodiments, the cancer is breast cancer, prostate cancer, lung cancer, or colon cancer. In still other embodiments, the epithelial cancer is non-small-cell lung cancer, nonpapillary renal cell carcinoma, cervical carcinoma, ovarian carcinoma (e.g., serous ovarian carcinoma), or breast carcinoma. The epithelial cancers may be characterized in various other ways including, but not limited to, serous, endometrioid, mucinous, clear cell, Brenner, or undifferentiated.

[0170] In certain embodiments, the cancer encompasses synovial sarcoma. Synovial sarcoma is an aggressive malignancy comprising 7-10% of all soft tissue tumors with a predominance in adolescents and young adults. The molecular hallmark of synovial sarcoma is a pathognomonic reciprocal translocation t(X;18)(p11; q11), leading to the fusion of SS18 (SYT) to one of the homologs SSX genes (most frequently SSX1 or SSX2, in rare cases SSX4), generating oncogenic SS18-SSX chimeric proteins.

[0171] Synovial sarcoma is a rare cancer. Only about 1 to 3 individuals in a million people are diagnosed with this disease each year. The diagnosis starts with imaging studies. X-ray, sonogram, CT scan, and MRI may be used in the course of evaluating a suspicious mass. After imaging studies, the next step in diagnosis is a biopsy to remove a sample of the tumor for further analysis. Among the different types of biopsies, open biopsy (a surgical incision is made to remove the sample) or core needle biopsy (a large needle is used to take the sample) are preferred. Normally, the sample tissue obtained from the biopsy is sent directly from the procedure room to a pathology laboratory to be sliced and fixed on small glass plates (slides). The pathologist commonly uses a technique called immunohistochemistry to learn about the tumor cells. Another technique called cytogenetics is often used to detect the chromosomal translocation specific to synovial sarcoma, which helps to confirm the diagnosis. Once a tumor has been deemed malignant, further imaging studies such as a PET scan of the whole body and/or CT scan of the chest, abdomen or pelvis may be used to look for possible metastases.

[0172] The primary treatment for synovial sarcoma is surgery to remove the entire tumor with clear margins when possible. “Clear margins” are achieved when healthy tissue surrounding the tumor is removed along with the tumor, making it more likely that all cancer cells have been removed from the area. Depending on the location and size of the mass, it may be difficult for a surgeon to remove adequate margins around the tumor while preserving function. Radiotherapy may also be used, either before or after surgery, to reduce the risk of leaving cells behind. Chemotherapy (typically Doxorubicin and/or Ifosfamide) may be recommended in the treatment of synovial sarcoma, especially in advanced or metastatic disease.

[0173] Prognosis in synovial sarcoma patients is influenced by the quality of surgery patients receive and the characteristics of the disease (including tumor size, local invasiveness, histological subtype, presence of metastases, and lymph node involvement). Patients with small tumors that can be completely removed with adequate margins at diagnosis have an excellent prognosis. The risk of developing distant metastases is higher for patients with tumors that are larger than 5 cm. Patients with the poorly differentiated subtype are considered to have a worse prognosis than those with other subtypes, and patients with metastases that cannot be removed have a poor prognosis.

[0174] The term “coding region” refers to regions of a nucleotide sequence comprising codons which are translated into amino acid residues, whereas the term “noncoding region” refers to regions of a nucleotide sequence that are not translated into amino acids (e.g., 5′ and 3′ untranslated regions).

[0175] The term “complementary” refers to the broad concept of sequence complementarity between regions of two nucleic acid strands or between two regions of the same nucleic acid strand. It is known that an adenine residue of a first nucleic acid region is capable of forming specific hydrogen bonds (“base pairing”) with a residue of a second nucleic acid region which is antiparallel to the first region if the residue is thymine or uracil. Similarly, it is known that a cytosine residue of a first nucleic acid strand is capable of base pairing with a residue of a second nucleic acid strand which is antiparallel to the first strand if the residue is guanine. A first region of a nucleic acid is complementary to a second region of the same or a different nucleic acid if, when the two regions are arranged in an antiparallel fashion, at least one nucleotide residue of the first region is capable of base pairing with a residue of the second region. Preferably, the first region comprises a first portion and the second region comprises a second portion, whereby, when the first and second portions are arranged in an antiparallel fashion, at least about 50%, and preferably at least about 75%, at least about 90%, or at least about 95% of the nucleotide residues of the first portion are capable of base pairing with nucleotide residues in the second portion. More preferably, all nucleotide residues of the first portion are capable of base pairing with nucleotide residues in the second portion.

[0176] The terms “conjoint therapy” and “combination therapy,” as used herein, refer to the administration of two or more therapeutic substances. The different agents comprising the combination therapy may be administered concomitant with, prior to, or following the administration of one or more therapeutic agents.

[0177] The term “control” refers to any reference standard suitable to provide a comparison to the expression products in the test sample. In one embodiment, the control comprises obtaining a “control sample” from which expression product levels are detected and compared to the expression product levels from the test sample. Such a control sample may comprise any suitable sample, including but not limited to a sample from a control cancer patient (can be stored sample or previous sample measurement) with a known outcome; normal tissue or cells isolated from a subject, such as a normal patient or the cancer patient, cultured primary cells/tissues isolated from a subject such as a normal subject or the cancer patient, adjacent normal cells/tissues obtained from the same organ or body location of the cancer patient, a tissue or cell sample isolated from a normal subject, or a primary cells/tissues obtained from a depository. In another preferred embodiment, the control may comprise a reference standard expression product level from any suitable source, including but not limited to housekeeping genes, an expression product level range from normal tissue (or other previously analyzed control sample), a previously determined expression product level range within a test sample from a group of patients, or a set of patients with a certain outcome (for example, survival for one, two, three, four years, etc.) or receiving a certain treatment (for example, standard of care cancer therapy). It will be understood by those of skill in the art that such control samples and reference standard expression product levels can be used in combination as controls in the methods of the present invention. In one embodiment, the control may comprise normal or non-cancerous cell/tissue sample. In another preferred embodiment, the control may comprise an expression level for a set of patients, such as a set of cancer patients, or for a set of cancer patients receiving a certain treatment, or for a set of patients with one outcome versus another outcome. In the former case, the specific expression product level of each patient can be assigned to a percentile level of expression, or expressed as either higher or lower than the mean or average of the reference standard expression level. In another preferred embodiment, the control may comprise normal cells, cells from patients treated with combination chemotherapy, and cells from patients having benign cancer. In another embodiment, the control may also comprise a measured value for example, average level of expression of a particular gene in a population compared to the level of expression of a housekeeping gene in the same population. Such a population may comprise normal subjects, cancer patients who have not undergone any treatment (i.e., treatment naive), cancer patients undergoing standard of care therapy, or patients having benign cancer. In another preferred embodiment, the control comprises a ratio transformation of expression product levels, including but not limited to determining a ratio of expression product levels of two genes in the test sample and comparing it to any suitable ratio of the same two genes in a reference standard; determining expression product levels of the two or more genes in the test sample and determining a difference in expression product levels in any suitable control; and determining expression product levels of the two or more genes in the test sample, normalizing their expression to expression of housekeeping genes in the test sample, and comparing to any suitable control. In particularly preferred embodiments, the control comprises a control sample which is of the same lineage and/or type as the test sample. In another embodiment, the control may comprise expression product levels grouped as percentiles within or based on a set of patient samples, such as all patients with cancer. In one embodiment a control expression product level is established wherein higher or lower levels of expression product relative to, for instance, a particular percentile, are used as the basis for predicting outcome. In another preferred embodiment, a control expression product level is established using expression product levels from cancer control patients with a known outcome, and the expression product levels from the test sample are compared to the control expression product level as the basis for predicting outcome. As demonstrated by the data below, the methods encompassed by the present invention are not limited to use of a specific cut-point in comparing the level of expression product in the test sample to the control.

[0178] The “copy number” of a biomarker nucleic acid refers to the number of DNA sequences in a cell (e.g., germline and/or somatic) encoding a particular gene product. Generally, for a given gene, a mammal has two copies of each gene. The copy number can be increased, however, by gene amplification or duplication, or reduced by deletion. For example, germline copy number changes include changes at one or more genomic loci, wherein said one or more genomic loci are not accounted for by the number of copies in the normal complement of germline copies in a control (e.g., the normal copy number in germline DNA for the same species as that from which the specific germline DNA and corresponding copy number were determined). Somatic copy number changes include changes at one or more genomic loci, wherein said one or more genomic loci are not accounted for by the number of copies in germline DNA of a control (e.g., copy number in germline DNA for the same subject as that from which the somatic DNA and corresponding copy number were determined).

[0179] The term “immune cell” refers to cells that play a role in the immune response. Immune cells are of hematopoietic origin, and include lymphocytes, such as B cells and T cells; natural killer cells; myeloid cells, such as monocytes, macrophages, eosinophils, mast cells, basophils, and granulocytes.

[0180] Conventional T cells, also known as Tconv or Teffs, have effector functions (e.g., cytokine secretion, cytotoxic activity, anti-self-recognization, and the like) to increase immune responses by virtue of their expression of one or more T cell receptors. Tcons or Teffs are generally defined as any T cell population that is not a Treg and include, for example, naive T cells, activated T cells, memory T cells, resting Tcons, or Tcons that have differentiated toward, for example, the Th1 or Th2 lineages. In some embodiments, Teffs are a subset of non-Treg T cells. In some embodiments, Teffs are CD4+ Teffs or CD8+ Teffs, such as CD4+ helper T lymphocytes (e.g., Th0, Th1, Tfh, or Th17) and CD8+ cytotoxic T lymphocytes. As described further herein, cytotoxic T cells are CD8+T lymphocytes. “Naive Tcons” are CD4⁺ T cells that have differentiated in bone marrow, and successfully underwent a positive and negative processes of central selection in a thymus, but have not yet been activated by exposure to an antigen. Naive Tcons are commonly characterized by surface expression of L-selectin (CD62L), absence of activation markers such as CD25, CD44 or CD69, and absence of memory markers such as CD45RO. Naive Tcons are therefore believed to be quiescent and non-dividing, requiring interleukin-7 (IL-7) and interleukin-15 (IL- 15) for homeostatic survival (see, at least WO 2010/101870). The presence and activity of such cells are undesired in the context of suppressing immune responses. Unlike Tregs, Tcons are not anergic and can proliferate in response to antigen-based T cell receptor activation (Lechler et al. (2001) Philos. Trans. R. Soc. Lond. Biol. Sci. 356:625-637). In tumors, exhausted cells can present hallmarks of anergy.

[0181] The term “immunotherapy” or “immunotherapies” refer to any treatment that uses certain parts of a subject's immune system to fight diseases such as cancer. The subject's own immune system is stimulated (or suppressed), with or without administration of one or more agent for that purpose. Immunotherapies that are designed to elicit or amplify an immune response are referred to as “activation immunotherapies.” Immunotherapies that are designed to reduce or suppress an immune response are referred to as “suppression immunotherapies.” Any agent believed to have an immune system effect on the genetically modified transplanted cancer cells can be assayed to determine whether the agent is an immunotherapy and the effect that a given genetic modification has on the modulation of immune response. In some embodiments, the immunotherapy is cancer cell-specific. In some embodiments, immunotherapy can be “untargeted,” which refers to administration of agents that do not selectively interact with immune system cells, yet modulates immune system function. Representative examples of untargeted therapies include, without limitation, chemotherapy, gene therapy, and radiation therapy.

[0182] Immunotherapy is one form of targeted therapy that may comprise, for example, the use of cancer vaccines and/or sensitized antigen presenting cells. For example, an oncolytic virus is a virus that is able to infect and lyse cancer cells, while leaving normal cells unharmed, making them potentially useful in cancer therapy. Replication of oncolytic viruses both facilitates tumor cell destruction and also produces dose amplification at the tumor site. They may also act as vectors for anticancer genes, allowing them to be specifically delivered to the tumor site. The immunotherapy can involve passive immunity for short-term protection of a host, achieved by the administration of pre-formed antibody directed against a cancer antigen or disease antigen (e.g., administration of a monoclonal antibody, optionally linked to a chemotherapeutic agent or toxin, to a tumor antigen). For example, anti-VEGF and mTOR inhibitors are known to be effective in treating renal cell carcinoma. Immunotherapy can also focus on using the cytotoxic lymphocyte-recognized epitopes of cancer cell lines. Alternatively, antisense polynucleotides, ribozymes, RNA interference molecules, triple helix polynucleotides and the like, can be used to selectively modulate biomolecules that are linked to the initiation, progression, and/or pathology of a tumor or cancer.

[0183] Immunotherapy can involve passive immunity for short-term protection of a host, achieved by the administration of pre-formed antibody directed against a cancer antigen or disease antigen (e.g., administration of a monoclonal antibody, optionally linked to a chemotherapeutic agent or toxin, to a tumor antigen). Immunotherapy can also focus on using the cytotoxic lymphocyte-recognized epitopes of cancer cell lines. Alternatively, antisense polynucleotides, ribozymes, RNA interference molecules, triple helix polynucleotides and the like, can be used to selectively modulate biomolecules that are linked to the initiation, progression, and/or pathology of a tumor or cancer.

[0184] In some embodiments, immunotherapy comprises inhibitors of one or more immune checkpoints. The term “immune checkpoint” refers to a group of molecules on the cell surface of CD4+ and/or CD8+T cells that fine-tune immune responses by down-modulating or inhibiting an anti-tumor immune response. Immune checkpoint proteins are well-known in the art and include, without limitation, CTLA-4, PD-1, VISTA, B7-H2, B7-H3, PD-L1, B7-H4, B7-H6, ICOS, HVEM, PD-L2, CD160, gp49B, PIR-B, KIR family receptors, TIM-1, TIM-3, TIM-4, LAG-3, GITR, 4-IBB, OX-40, BTLA, SIRPalpha (CD47), CD48, 2B4 (CD244), B7.1, B7.2, ILT-2, ILT-4, TIGIT, HHLA2, butyrophilins, and A2aR (see, for example, WO 2012/177624). The term further encompasses biologically active protein fragment, as well as nucleic acids encoding full-length immune checkpoint proteins and biologically active protein fragments thereof. In some embodiment, the term further encompasses any fragment according to homology descriptions provided herein. In one embodiment, the immune checkpoint is PD-1.

[0185] Immune checkpoints and their sequences are well-known in the art and representative embodiments are described below. For example, the term “PD-1” refers to a member of the immunoglobulin gene superfamily that functions as a coinhibitory receptor having PD-L1 and PD-L2 as known ligands. PD-1 was previously identified using a subtraction cloning based approach to select for genes upregulated during TCR-induced activated T cell death. PD-1 is a member of the CD28/CTLA-4 family of molecules based on its ability to bind to PD-L1. Like CTLA-4, PD-1 is rapidly induced on the surface of T-cells in response to anti-CD3 (Agata et al. 25 (1996) Int. Immunol. 8:765). In contrast to CTLA-4, however, PD-1 is also induced on the surface of B-cells (in response to anti-IgM). PD-1 is also expressed on a subset of thymocytes and myeloid cells (Agata et al. (1996) supra; Nishimura et al. (1996) Int. Immunol. 8:773).

[0186] The nucleic acid and amino acid sequences of a representative human PD-1 biomarker is available to the public at the GenBank database under NM_005018.2 and NP_005009.2 (see also Ishida et al. (1992) 20 EMBO J 11:3887; Shinohara et al. (1994) Genomics 23:704; U.S. Pat. No. 5,698,520). PD-1 has an extracellular region containing immunoglobulin superfamily domain, a transmembrane domain, and an intracellular region including an immunoreceptor tyrosine-based inhibitory motif (ITIM) (Ishida et al. (1992) EMBO J. 11:3887; Shinohara et al. (1994) Genomics 23:704; and U.S. Pat. No. 5,698,520) and an immunoreceptor tyrosine-based switch motif (ITSM). These features also define a larger family of polypeptides, called the immunoinhibitory receptors, which also includes gp49B, PIR-B, and the killer inhibitory receptors (KIRs) (Vivier and Daeron (1997) Immunol. Today 18:286). It is often assumed that the tyrosyl phosphorylated ITIM and ITSM motif of these receptors interacts with SH2-domain containing phosphatases, which leads to inhibitory signals. A subset of these immunoinhibitory receptors bind to MHC polypeptides, for example the KIRs, and CTLA4 binds to B7-1 and B7-2. It has been proposed that there is a phylogenetic relationship between the MHC and B7 genes (Henry et al. (1999) Immunol. Today 20(6):285-8). Nucleic acid and polypeptide sequences of PD-1 orthologs in organisms other than humans are well-known and include, for example, rat PD-1 (NM_001106927.1 and NP_001100397.1), dog PD-1 (XM_543338.3 and XP_543338.3), cow PD-1 (NM_001083506.1 and NP_001076975.1), and chicken PD-1 (XM_422723.3 and XP_422723.2).

[0187] PD-1 polypeptides are inhibitory receptors capable of transmitting an inhibitory signal to an immune cell to thereby inhibit immune cell effector function, or are capable of promoting costimulation (e.g., by competitive inhibition) of immune cells, e.g., when present in soluble, monomeric form. Preferred PD-1 family members share sequence identity with PD-1 and bind to one or more B7 family members, e.g., B7-1, B7-2, PD-1 ligand, and/or other polypeptides on antigen presenting cells.

[0188] The term “PD-1 activity,” includes the ability of a PD-1 polypeptide to modulate an inhibitory signal in an activated immune cell, e.g., by engaging a natural PD-1 ligand on an antigen presenting cell. Modulation of an inhibitory signal in an immune cell results in modulation of proliferation of, and/or cytokine secretion by, an immune cell. Thus, the term “PD-1 activity” includes the ability of a PD-1 polypeptide to bind its natural ligand(s), the ability to modulate immune cell costimulatory or inhibitory signals, and the ability to modulate the immune response.

[0189] The term “PD-1 ligand” refers to binding partners of the PD-1 receptor and includes both PD-L1 (Freeman et al. (2000) J. Exp. Med. 192:1027-1034) and PD-L2 (Latchman et al. (2001) Nat. Immunol. 2:261). At least two types of human PD-1 ligand polypeptides exist. PD-1 ligand proteins comprise a signal sequence, and an IgV domain, an IgC domain, a transmembrane domain, and a short cytoplasmic tail. Both PD-L1 (See Freeman et al. (2000) for sequence data) and PD-L2 (See Latchman et al. (2001) Nat. Immunol. 2:261 for sequence data) are members of the B7 family of polypeptides. Both PD-L1 and PD-L2 are expressed in placenta, spleen, lymph nodes, thymus, and heart. Only PD-L2 is expressed in pancreas, lung and liver, while only PD-L1 is expressed in fetal liver. Both PD-1 ligands are upregulated on activated monocytes and dendritic cells, although PD-L1 expression is broader. For example, PD-L1 is known to be constitutively expressed and upregulated to higher levels on murine hematopoietic cells (e.g., T cells, B cells, macrophages, dendritic cells (DCs), and bone marrow-derived mast cells) and non-hematopoietic cells (e.g., endothelial, epithelial, and muscle cells), whereas PD-L2 is inducibly expressed on DCs, macrophages, and bone marrow-derived mast cells (see Butte et al. (2007) Immunity 27:111).

[0190] PD-1 ligands comprise a family of polypeptides having certain conserved structural and functional features. The term “family” when used to refer to proteins or nucleic acid molecules, is intended to mean two or more proteins or nucleic acid molecules having a common structural domain or motif and having sufficient amino acid or nucleotide sequence homology, as defined herein. Such family members can be naturally or non-naturally occurring and can be from either the same or different species. For example, a family can contain a first protein of human origin, as well as other, distinct proteins of human origin or alternatively, can contain homologues of non-human origin. Members of a family may also have common functional characteristics. PD-1 ligands are members of the B7 family of polypeptides. The term “B7 family” or “B7 polypeptides” as used herein includes costimulatory polypeptides that share sequence homology with B7 polypeptides, e.g., with B7-1, B7-2, B7h (Swallow et al. (1999) Immunity 11:423), and/or PD-1 ligands (e.g., PD-L1 or PD-L2). For example, human B7-1 and B7-2 share approximately 26% amino acid sequence identity when compared using the BLAST program at NCBI with the default parameters (Blosum62 matrix with gap penalties set at existence 11 and extension 1 (See the NCBI website). The term B7 family also includes variants of these polypeptides which are capable of modulating immune cell function. The B7 family of molecules share a number of conserved regions, including signal domains, IgV domains and the IgC domains. IgV domains and the IgC domains are art-recognized Ig superfamily member domains. These domains correspond to structural units that have distinct folding patterns called Ig folds. Ig folds are comprised of a sandwich of two R sheets, each consisting of anti-parallel β strands of 5-10 amino acids with a conserved disulfide bond between the two sheets in most, but not all, IgC domains of Ig, TCR, and MHC molecules share the same types of sequence patterns and are called the C1-set within the Ig superfamily. Other IgC domains fall within other sets. IgV domains also share sequence patterns and are called V set domains. IgV domains are longer than IgC domains and contain an additional pair of R strands.

[0191] Preferred B7 polypeptides are capable of providing costimulatory or inhibitory signals to immune cells to thereby promote or inhibit immune cell responses. For example, B7 family members that bind to costimulatory receptors increase T cell activation and proliferation, while B7 family members that bind to inhibitory receptors reduce costimulation. Moreover, the same B7 family member may increase or decrease T cell costimulation. For example, when bound to a costimulatory receptor, PD-1 ligand can induce costimulation of immune cells or can inhibit immune cell costimulation, e.g., when present in soluble form. When bound to an inhibitory receptor, PD-1 ligand polypeptides can transmit an inhibitory signal to an immune cell. Preferred B7 family members include B7-1, B7-2, B7h, PD-L1 or PD-L2 and soluble fragments or derivatives thereof. In one embodiment, B7 family members bind to one or more receptors on an immune cell, e.g., CTLA4, CD28, ICOS, PD-1 and/or other receptors, and, depending on the receptor, have the ability to transmit an inhibitory signal or a costimulatory signal to an immune cell, preferably a T cell.

[0192] Modulation of a costimulatory signal results in modulation of effector function of an immune cell. Thus, the term “PD-1 ligand activity” includes the ability of a PD-1 ligand polypeptide to bind its natural receptor(s) (e.g. PD-1 or B7-1), the ability to modulate immune cell costimulatory or inhibitory signals, and the ability to modulate the immune response.

[0193] The term “PD-L1” refers to a specific PD-1 ligand. Two forms of human PD-L1 molecules have been identified. One form is a naturally occurring PD-L1 soluble polypeptide, i.e., having a short hydrophilic domain and no transmembrane domain, and is referred to herein as PD-L1S. The second form is a cell-associated polypeptide, i.e., having a transmembrane and cytoplasmic domain, referred to herein as PD-L1M. The nucleic acid and amino acid sequences of representative human PD-L1 biomarkers regarding PD-L1M are also available to the public at the GenBank database under NM_014143.3 and NP_054862.I. PD-L1 proteins comprise a signal sequence, and an IgV domain and an IgC domain. The signal sequence of PD-L1S is from about amino acid 1 to about amino acid 18. The signal sequence of PD-L1M is from about amino acid 1 to about amino acid 18. The IgV domain of PD-L1S is from about amino acid 19 to about amino acid 134 and the IgV domain of PD-L1M is from about amino acid 19 to about amino acid 134. The IgC domain of PD-L1S is from about amino acid 135 to about amino acid 227 and the IgC domain of PD-L1M is from about amino acid 135 to about amino acid 227. The hydrophilic tail of the PD-L1 exemplified in PD-L1S comprises a hydrophilic tail shown from about amino acid 228 to about amino acid 245. The PD-L1 polypeptide of PD-L1M comprises a transmembrane domain from about amino acids 239 to about amino acid 259 of PD-L1M and a cytoplasmic domain shown from about amino acid 260 to about amino acid 290 of PD-L1M. In addition, nucleic acid and polypeptide sequences of PD-L1 orthologs in organisms other than humans are well-known and include, for example, rat PD-L1 (NM_001191954.1 and NP_001178883.1), dog PD-L1 (XM_541302.3 and XP_541302.3), cow PD-L1 (NM_001163412.1 and NP_001156884.1), and chicken PD-L1 (XM_424811.3 and XP_424811.3).

[0194] The term “PD-L2” refers to another specific PD-1 ligand. PD-L2 is a B7 family member expressed on various APCs, including dendritic cells, macrophages and bone-marrow derived mast cells (Zhong et al. (2007) Eur. J. Immunol. 37:2405). APC-expressed PD-L2 is able to both inhibit T cell activation through ligation of PD-1 and costimulate T cell activation, through a PD-1 independent mechanism (Shin et al. (2005) J. Exp. Med. 201:1531). In addition, ligation of dendritic cell-expressed PD-L2 results in enhanced dendritic cell cytokine expression and survival (Radhakrishnan et al. (2003) J. Immunol. 37:1827; Nguyen et al. (2002) J. Exp. Med. 196:1393). The nucleic acid and amino acid sequences of representative human PD-L2 biomarkers are well-known in the art and are also available to the public at the GenBank database under NM_025239.3 and NP_079515.2. PD-L2 proteins are characterized by common structural elements. In some embodiments, PD-L2 proteins include at least one or more of the following domains: a signal peptide domain, a transmembrane domain, an IgV domain, an IgC domain, an extracellular domain, a transmembrane domain, and a cytoplasmic domain. For example, amino acids 1-19 of PD-L2 comprises a signal sequence. As used herein, a “signal sequence” or “signal peptide” serves to direct a polypeptide containing such a sequence to a lipid bilayer, and is cleaved in secreted and membrane bound polypeptides and includes a peptide containing about 15 or more amino acids which occurs at the N-terminus of secretory and membrane bound polypeptides and which contains a large number of hydrophobic amino acid residues. For example, a signal sequence contains at least about 10-30 amino acid residues, preferably about 15-25 amino acid residues, more preferably about 18-20 amino acid residues, and even more preferably about 19 amino acid residues, and has at least about 35-65%, preferably about 38-50%, and more preferably about 40-45% hydrophobic amino acid residues (e.g., valine, leucine, isoleucine or phenylalanine). In another embodiment, amino acid residues 220-243 of the native human PD-L2 polypeptide and amino acid residues 201-243 of the mature polypeptide comprise a transmembrane domain. As used herein, the term “transmembrane domain” includes an amino acid sequence of about 15 amino acid residues in length which spans the plasma membrane. More preferably, a transmembrane domain includes about at least 20, 25, 30, 35, 40, or 45 amino acid residues and spans the plasma membrane. Transmembrane domains are rich in hydrophobic residues, and typically have an alpha-helical structure. In a preferred embodiment, at least 50%, 60%, 70%, 80%, 90%, 95% or more of the amino acids of a transmembrane domain are hydrophobic, e.g., leucines, isoleucines, tyrosines, or tryptophans. Transmembrane domains are described in, for example, Zagotta, W. N. et al. (1996) Annu. Rev. Neurosci. 19: 235-263. In still another embodiment, amino acid residues 20-120 of the native human PD-L2 polypeptide and amino acid residues 1-101 of the mature polypeptide comprise an IgV domain. Amino acid residues 121-219 of the native human PD-L2 polypeptide and amino acid residues 102-200 of the mature polypeptide comprise an IgC domain. As used herein, IgV and IgC domains are recognized in the art as Ig superfamily member domains. These domains correspond to structural units that have distinct folding patterns called Ig folds. Ig folds are comprised of a sandwich of two B sheets, each consisting of antiparallel (3 strands of 5-10 amino acids with a conserved disulfide bond between the two sheets in most, but not all, domains. IgC domains of Ig, TCR, and MHC molecules share the same types of sequence patterns and are called the Cl set within the Ig superfamily. Other IgC domains fall within other sets. IgV domains also share sequence patterns and are called V set domains. IgV domains are longer than C-domains and form an additional pair of strands. In yet another embodiment, amino acid residues 1-219 of the native human PD-L2 polypeptide and amino acid residues 1-200 of the mature polypeptide comprise an extracellular domain. As used herein, the term “extracellular domain” represents the N-terminal amino acids which extend as a tail from the surface of a cell. An extracellular domain of the present invention includes an IgV domain and an IgC domain, and may include a signal peptide domain. In still another embodiment, amino acid residues 244-273 of the native human PD-L2 polypeptide and amino acid residues 225-273 of the mature polypeptide comprise a cytoplasmic domain. As used herein, the term “cytoplasmic domain” represents the C-terminal amino acids which extend as a tail into the cytoplasm of a cell. In addition, nucleic acid and polypeptide sequences of PD-L2 orthologs in organisms other than humans are well-known and include, for example, rat PD-L2 (NM_001107582.2 and NP_001101052.2), dog PD-L2 (XM_847012.2 and XP_852105.2), cow PD-L2 (XM_586846.5 and XP_586846.3), and chimpanzee PD-L2 (XM_001140776.2 and XP_001140776.1).

[0195] The term “PD-L2 activity,” “biological activity of PD-L2,” or “functional activity of PD-L2,” refers to an activity exerted by a PD-L2 protein, polypeptide or nucleic acid molecule on a PD-L2-responsive cell or tissue, or on a PD-L2 polypeptide binding partner, as determined in vivo, or in vitro, according to standard techniques. In one embodiment, a PD-L2 activity is a direct activity, such as an association with a PD-L2 binding partner. As used herein, a “target molecule” or “binding partner” is a molecule with which a PD-L2 polypeptide binds or interacts in nature, such that PD-L2-mediated function is achieved. In an exemplary embodiment, a PD-L2 target molecule is the receptor RGMb. Alternatively, a PD-L2 activity is an indirect activity, such as a cellular signaling activity mediated by interaction of the PD-L2 polypeptide with its natural binding partner (i.e., physiologically relevant interacting macromolecule involved in an immune function or other biologically relevant function), e.g., RGMb. The biological activities of PD-L2 are described herein. For example, the PD-L2 polypeptides of the present invention can have one or more of the following activities: 1) bind to and/or modulate the activity of the receptor RGMb, PD-1, or other PD-L2 natural binding partners, 2) modulate intra- or intercellular signaling, 3) modulate activation of immune cells, e.g., T lymphocytes, and 4) modulate the immune response of an organism, e.g., a human organism.

[0196] “Anti-immune checkpoint therapy” refers to the use of agents that inhibit immune checkpoint nucleic acids and/or proteins. Inhibition of one or more immune checkpoints can block or otherwise neutralize inhibitory signaling to thereby upregulate an immune response in order to more efficaciously treat cancer. Exemplary agents useful for inhibiting immune checkpoints include antibodies, small molecules, peptides, peptidomimetics, natural ligands, and derivatives of natural ligands, that can either bind and/or inactivate or inhibit immune checkpoint proteins, or fragments thereof; as well as RNA interference, antisense, nucleic acid aptamers, etc. that can downregulate the expression and/or activity of immune checkpoint nucleic acids, or fragments thereof. Exemplary agents for upregulating an immune response include antibodies against one or more immune checkpoint proteins block the interaction between the proteins and its natural receptor(s); a non-activating form of one or more immune checkpoint proteins (e.g., a dominant negative polypeptide); small molecules or peptides that block the interaction between one or more immune checkpoint proteins and its natural receptor(s); fusion proteins (e.g. the extracellular portion of an immune checkpoint inhibition protein fused to the Fc portion of an antibody or immunoglobulin) that bind to its natural receptor(s); nucleic acid molecules that block immune checkpoint nucleic acid transcription or translation; and the like. Such agents can directly block the interaction between the one or more immune checkpoints and its natural receptor(s) (e.g., antibodies) to prevent inhibitory signaling and upregulate an immune response. Alternatively, agents can indirectly block the interaction between one or more immune checkpoint proteins and its natural receptor(s) to prevent inhibitory signaling and upregulate an immune response. For example, a soluble version of an immune checkpoint protein ligand such as a stabilized extracellular domain can binding to its receptor to indirectly reduce the effective concentration of the receptor to bind to an appropriate ligand. In one embodiment, anti-PD-1 antibodies, anti-PD-L1 antibodies, and/or anti-PD-L2 antibodies, either alone or in combination, are used to inhibit immune checkpoints. These embodiments are also applicable to specific therapy against particular immune checkpoints, such as the PD-1 pathway (e.g., anti-PD-1 pathway therapy, otherwise known as PD-1 pathway inhibitor therapy).

[0197] The term “immune response” includes T cell mediated and/or B cell mediated immune responses. Exemplary immune responses include T cell responses, e.g., cytokine production and cellular cytotoxicity. In addition, the term immune response includes immune responses that are indirectly effected by T cell activation, e.g., antibody production (humoral responses) and activation of cytokine responsive cells, e.g., macrophages.

[0198] The term “immunotherapeutic agent” can include any molecule, peptide, antibody or other agent which can stimulate a host immune system to generate an immune response to a tumor or cancer in the subject. Various immunotherapeutic agents are useful in the compositions and methods described herein.

[0199] The term “inhibit” includes decreasing, reducing, limiting, and/or blocking, of, for example a particular action, function, and/or interaction. In some embodiments, the interation between two molecules is “inhibited” if the interaction is reduced, blocked, disrupted or destabilized.

[0200] In some embodiments, cancer is “inhibited” if at least one symptom of the cancer is alleviated, terminated, slowed, or prevented. As used herein, cancer is also “inhibited” if recurrence or metastasis of the cancer is reduced, slowed, delayed, or prevented.

[0201] The term “interaction”, when referring to an interaction between two molecules, refers to the physical contact (e.g., binding) of the molecules with one another. Generally, such an interaction results in an activity (which produces a biological effect) of one or both of said molecules.

[0202] An “isolated protein” refers to a protein that is substantially free of other proteins, cellular material, separation medium, and culture medium when isolated from cells or produced by recombinant DNA techniques, or chemical precursors or other chemicals when chemically synthesized. An “isolated” or “purified” protein or biologically active portion thereof is substantially free of cellular material or other contaminating proteins from the cell or tissue source from which the antibody, polypeptide, peptide or fusion protein is derived, or substantially free from chemical precursors or other chemicals when chemically synthesized. The language “substantially free of cellular material” includes preparations of a biomarker polypeptide or fragment thereof, in which the protein is separated from cellular components of the cells from which it is isolated or recombinantly produced. In one embodiment, the language “substantially free of cellular material” includes preparations of a biomarker protein or fragment thereof, having less than about 30% (by dry weight) of non-biomarker protein (also referred to herein as a “contaminating protein”), more preferably less than about 20% of non-biomarker protein, still more preferably less than about 10% of non-biomarker protein, and most preferably less than about 5% non-biomarker protein. When antibody, polypeptide, peptide or fusion protein or fragment thereof, e.g., a biologically active fragment thereof, is recombinantly produced, it is also preferably substantially free of culture medium, i.e., culture medium represents less than about 20%, more preferably less than about 10%, and most preferably less than about 5% of the volume of the protein preparation.

[0203] As used herein, the term “isotype” refers to the antibody class (e.g., IgM, IgG1, IgG2C, and the like) that is encoded by heavy chain constant region genes.

[0204] The “normal” level of expression of a biomarker is the level of expression of the biomarker in cells of a subject, e.g., a human patient, not afflicted with a cancer. An “over-expression” or “significantly higher level of expression” of a biomarker refers to an expression level in a test sample that is greater than the standard error of the assay employed to assess expression, and is preferably at least 10%, and more preferably 1.2, 1.3, 1.4, 1.5, 1.6, 1.7, 1.8, 1.9, 2.0, 2.1, 2.1, 2.2, 2.3, 2.4, 2.5, 2.6, 2.7, 2.8, 2.9, 3, 3.5, 4, 4.5, 5, 5.5, 6, 6.5, 7, 7.5, 8, 8.5, 9, 9.5, 10, 10.5, 11, 12, 13, 14, 15, 16, 17, 18, 19, 20 times or more higher than the expression activity or level of the biomarker in a control sample (e.g., sample from a healthy subject not having the biomarker associated disease) and preferably, the average expression level of the biomarker in several control samples. A “significantly lower level of expression” of a biomarker refers to an expression level in a test sample that is at least 10%, and more preferably 1.2, 1.3, 1.4, 1.5, 1.6, 1.7, 1.8, 1.9, 2.0, 2.1, 2.1, 2.2, 2.3, 2.4, 2.5, 2.6, 2.7, 2.8, 2.9, 3, 3.5, 4, 4.5, 5, 5.5, 6, 6.5, 7, 7.5, 8, 8.5, 9, 9.5, 10, 10.5, 11, 12, 13, 14, 15, 16, 17, 18, 19, 20 times or more lower than the expression level of the biomarker in a control sample (e.g., sample from a healthy subject not having the biomarker associated disease) and preferably, the average expression level of the biomarker in several control samples.

[0205] An “over-expression” or “significantly higher level of expression” of a biomarker refers to an expression level in a test sample that is greater than the standard error of the assay employed to assess expression, and is preferably at least 10%, and more preferably 1.2, 1.3, 1.4, 1.5, 1.6, 1.7, 1.8, 1.9, 2.0, 2.1, 2.1, 2.2, 2.3, 2.4, 2.5, 2.6, 2.7, 2.8, 2.9, 3, 3.5, 4, 4.5, 5, 5.5, 6, 6.5, 7, 7.5, 8, 8.5, 9, 9.5, 10, 10.5, 11, 12, 13, 14, 15, 16, 17, 18, 19, 20 times or more higher than the expression activity or level of the biomarker in a control sample (e.g., sample from a healthy subject not having the biomarker associated disease) and preferably, the average expression level of the biomarker in several control samples. A “significantly lower level of expression” of a biomarker refers to an expression level in a test sample that is at least 10%, and more preferably 1.2, 1.3, 1.4, 1.5, 1.6, 1.7, 1.8, 1.9, 2.0, 2.1, 2.1, 2.2, 2.3, 2.4, 2.5, 2.6, 2.7, 2.8, 2.9, 3, 3.5, 4, 4.5, 5, 5.5, 6, 6.5, 7, 7.5, 8, 8.5, 9, 9.5, 10, 10.5, 11, 12, 13, 14, 15, 16, 17, 18, 19, 20 times or more lower than the expression level of the biomarker in a control sample (e.g., sample from a healthy subject not having the biomarker associated disease) and preferably, the average expression level of the biomarker in several control samples.

[0206] The term “predictive” includes the use of a biomarker nucleic acid and/or protein status, e.g., over- or under- activity, emergence, expression, growth, remission, recurrence or resistance of tumors before, during or after therapy, for determining the likelihood of response of a cancer to an agent that inhibits binding of a SS18-SSX fusion protein to an H2A K119Ub-marked nucleosome alone or in combination with an immunotherapy and/or cancer therapy. Such predictive use of the biomarker may be confirmed by, e.g., (1) increased or decreased copy number (e.g., by FISH, FISH plus SKY, single-molecule sequencing, e.g., as described in the art at least at J. Biotechnol., 86:289-301, or qPCR), overexpression or underexpression of a biomarker nucleic acid (e.g., by ISH, Northern Blot, or qPCR), increased or decreased biomarker protein (e.g., by IHC), or increased or decreased activity, e.g., in more than about 5%, 6%, 7%, 8%, 9%, 10%, 11%, 12%, 13%, 14%, 15%, 20%, 25%, 30%, 40%, 50%, 60%, 70%, 80%, 90%, 95%, 100%, or more of assayed human cancers types or cancer samples; (2) its absolute or relatively modulated presence or absence in a biological sample, e.g., a sample containing tissue, whole blood, serum, plasma, buccal scrape, saliva, cerebrospinal fluid, urine, stool, or bone marrow, from a subject, e.g. a human, afflicted with cancer; (3) its absolute or relatively modulated presence or absence in clinical subset of patients with cancer (e.g., those responding to an agent that inhibits binding of a SS18-SSX fusion protein to an H2A K119Ub-marked nucleosome alone or in combination with an immunotherapy and/or cancer therapy, or those developing resistance thereto).

[0207] The terms “prevent,” “preventing,” “prevention,” “prophylactic treatment,” and the like refer to reducing the probability of developing a disease, disorder, or condition in a subject, who does not have, but is at risk of or susceptible to developing a disease, disorder, or condition.

[0208] The term “cancer response,” “response to immunotherapy,” or “response to modulators of T-cell mediated cytotoxicity/immunotherapy combination therapy” relates to any response of the hyperproliferative disorder (e.g., cancer) to a cancer agent, such as a modulator of T-cell mediated cytotoxicity, and an immunotherapy, preferably to a change in tumor mass and/or volume after initiation of neoadjuvant or adjuvant therapy. Hyperproliferative disorder response may be assessed, for example for efficacy or in a neoadjuvant or adjuvant situation, where the size of a tumor after systemic intervention can be compared to the initial size and dimensions as measured by CT, PET, mammogram, ultrasound or palpation. Responses may also be assessed by caliper measurement or pathological examination of the tumor after biopsy or surgical resection. Response may be recorded in a quantitative fashion like percentage change in tumor volume or in a qualitative fashion like “pathological complete response” (pCR), “clinical complete remission” (cCR), “clinical partial remission” (cPR), “clinical stable disease” (cSD), “clinical progressive disease” (cPD) or other qualitative criteria. Assessment of hyperproliferative disorder response may be done early after the onset of neoadjuvant or adjuvant therapy, e.g., after a few hours, days, weeks or preferably after a few months. A typical endpoint for response assessment is upon termination of neoadjuvant chemotherapy or upon surgical removal of residual tumor cells and/or the tumor bed. This is typically three months after initiation of neoadjuvant therapy. In some embodiments, clinical efficacy of the therapeutic treatments described herein may be determined by measuring the clinical benefit rate (CBR). The clinical benefit rate is measured by determining the sum of the percentage of patients who are in complete remission (CR), the number of patients who are in partial remission (PR) and the number of patients having stable disease (SD) at a time point at least 6 months out from the end of therapy. The shorthand for this formula is CBR=CR+PR+SD over 6 months. In some embodiments, the CBR for a particular cancer therapeutic regimen is at least 25%, 30%, 35%, 40%, 45%, 50%, 55%, 60%, 65%, 70%, 75%, 80%, 85%, or more. Additional criteria for evaluating the response to cancer therapies are related to “survival,” which includes all of the following: survival until mortality, also known as overall survival (wherein said mortality may be either irrespective of cause or tumor related); “recurrence-free survival” (wherein the term recurrence shall include both localized and distant recurrence); metastasis free survival; disease free survival (wherein the term disease shall include cancer and diseases associated therewith). The length of said survival may be calculated by reference to a defined start point (e.g., time of diagnosis or start of treatment) and end point (e.g., death, recurrence or metastasis). In addition, criteria for efficacy of treatment can be expanded to include response to chemotherapy, probability of survival, probability of metastasis within a given time period, and probability of tumor recurrence. For example, in order to determine appropriate threshold values, a particular cancer therapeutic regimen can be administered to a population of subjects and the outcome can be correlated to biomarker measurements that were determined prior to administration of any cancer therapy. The outcome measurement may be pathologic response to therapy given in the neoadjuvant setting. Alternatively, outcome measures, such as overall survival and disease-free survival can be monitored over a period of time for subjects following cancer therapy for which biomarker measurement values are known. In certain embodiments, the doses administered are standard doses known in the art for cancer therapeutic agents. The period of time for which subjects are monitored can vary. For example, subjects may be monitored for at least 2, 4, 6, 8, 10, 12, 14, 16, 18, 20, 25, 30, 35, 40, 45, 50, 55, or 60 months. Biomarker measurement threshold values that correlate to outcome of a cancer therapy can be determined using well-known methods in the art, such as those described in the Examples section.

[0209] The term “resistance” refers to an acquired or natural resistance of a cancer sample or a mammal to a cancer therapy (i.e., being nonresponsive to or having reduced or limited response to the therapeutic treatment), such as having a reduced response to a therapeutic treatment by 5%, 10%, 15%, 20%, 25%, 30%, 35%, 40%, 45%, 50%, 55%, 60%, 65%, 70%, 75%, 80%, 85%, 90%, 95%, 100%, or more, such 2-fold, 3-fold, 4-fold, 5-fold, 10-fold, 15-fold, 20-fold or more, or any range in between, inclusive. The reduction in response can be measured by comparing with the same cancer sample or mammal before the resistance is acquired, or by comparing with a different cancer sample or a mammal that is known to have no resistance to the therapeutic treatment. A typical acquired resistance to chemotherapy is called “multidrug resistance.” The multidrug resistance can be mediated by P-glycoprotein or can be mediated by other mechanisms, or it can occur when a mammal is infected with a multi-drug-resistant microorganism or a combination of microorganisms. The determination of resistance to a therapeutic treatment is routine in the art and within the skill of an ordinarily skilled clinician, for example, can be measured by cell proliferative assays and cell death assays as described herein as “sensitizing.” In some embodiments, the term “reverses resistance” means that the use of a second agent in combination with a primary cancer therapy (e.g., chemotherapeutic or radiation therapy) is able to produce a significant decrease in tumor volume at a level of statistical significance (e.g., p<0.05) when compared to tumor volume of untreated tumor in the circumstance where the primary cancer therapy (e.g., chemotherapeutic or radiation therapy) alone is unable to produce a statistically significant decrease in tumor volume compared to tumor volume of untreated tumor. This generally applies to tumor volume measurements made at a time when the untreated tumor is growing log rhythmically.

[0210] The terms “response” or “responsiveness” refers to an cancer response, e.g. in the sense of reduction of tumor size or inhibiting tumor growth. The terms can also refer to an improved prognosis, for example, as reflected by an increased time to recurrence, which is the period to first recurrence censoring for second primary cancer as a first event or death without evidence of recurrence, or an increased overall survival, which is the period from treatment to death from any cause. To respond or to have a response means there is a beneficial endpoint attained when exposed to a stimulus. Alternatively, a negative or detrimental symptom is minimized, mitigated or attenuated on exposure to a stimulus. It will be appreciated that evaluating the likelihood that a tumor or subject will exhibit a favorable response is equivalent to evaluating the likelihood that the tumor or subject will not exhibit favorable response (i.e., will exhibit a lack of response or be non-responsive).

[0211] An “RNA interfering agent” as used herein, is defined as any agent which interferes with or inhibits expression of a target biomarker gene by RNA interference (RNAi). Such RNA interfering agents include, but are not limited to, nucleic acid molecules including RNA molecules which are homologous to the target biomarker gene of the present invention, or a fragment thereof, short interfering RNA (siRNA), and small molecules which interfere with or inhibit expression of a target biomarker nucleic acid by RNA interference (RNAi). “RNA interference (RNAi)” is an evolutionally conserved process whereby the expression or introduction of RNA of a sequence that is identical or highly similar to a target biomarker nucleic acid results in the sequence specific degradation or specific post-transcriptional gene silencing (PTGS) of messenger RNA (mRNA) transcribed from that targeted gene (see Coburn and Cullen (2002) J. Virol. 76:9225), thereby inhibiting expression of the target biomarker nucleic acid. In one embodiment, the RNA is double stranded RNA (dsRNA). This process has been described in plants, invertebrates, and mammalian cells. In nature, RNAi is initiated by the dsRNA-specific endonuclease Dicer, which promotes processive cleavage of long dsRNA into double-stranded fragments termed siRNAs. siRNAs are incorporated into a protein complex that recognizes and cleaves target mRNAs. RNAi can also be initiated by introducing nucleic acid molecules, e.g., synthetic siRNAs or RNA interfering agents, to inhibit or silence the expression of target biomarker nucleic acids. As used herein, “inhibition of target biomarker nucleic acid expression” or “inhibition of marker gene expression” includes any decrease in expression or protein activity or level of the target biomarker nucleic acid or protein encoded by the target biomarker nucleic acid. The decrease may be of at least 30%, 40%, 50%, 60%, 70%, 80%, 90%, 95% or 99% or more as compared to the expression of a target biomarker nucleic acid or the activity or level of the protein encoded by a target biomarker nucleic acid which has not been targeted by an RNA interfering agent.

[0212] In addition to RNAi, genome editing can be used to modulate the copy number or genetic sequence of a biomarker of interest, such as constitutive or induced knockout or mutation of a biomarker of interest. For example, the CRISPR-Cas system can be used for precise editing of genomic nucleic acids (e.g., for creating non-functional or null mutations). In such embodiments, the CRISPR guide RNA and/or the Cas enzyme may be expressed. For example, a vector containing only the guide RNA can be administered to an animal or cells transgenic for the Cas9 enzyme. Similar strategies may be used (e.g., designer zinc finger, transcription activator-like effectors (TALEs) or homing meganucleases). Such systems are well-known in the art (see, for example, U.S. Pat. No. 8,697,359; Sander and Joung (2014) Nat. Biotech. 32:347-355; Hale et al. (2009) Cell 139:945-956; Karginov and Hannon (2010) Mol. Cell 37:7; U.S. Pat. Publ. 2014/0087426 and 2012/0178169; Boch et al. (2011) Nat. Biotech. 29:135-136; Boch et al. (2009) Science 326:1509-1512; Moscou and Bogdanove (2009) Science 326:1501; Weber et al. (2011) PLoS One 6:e19722; Li et al. (2011) Nucl. Acids Res. 39:6315-6325; Zhang et al. (2011) Nat. Biotech. 29:149-153; Miller et al. (2011) Nat. Biotech. 29:143-148; Lin et al. (2014) Nucl. Acids Res. 42:e47). Such genetic strategies can use constitutive expression systems or inducible expression systems according to well-known methods in the art.

[0213] The term “sample” used for detecting or determining the presence or level of at least one biomarker is typically whole blood, plasma, serum, saliva, urine, stool (e.g., feces), tears, and any other bodily fluid (e.g., as described above under the definition of “body fluids”), or a tissue sample (e.g., biopsy) such as bone marrow and bone sample, or surgical resection tissue. In certain instances, the method of the present invention further comprises obtaining the sample from the individual prior to detecting or determining the presence or level of at least one marker in the sample.

[0214] The term “sensitize” means to alter cancer cells or tumor cells in a way that allows for more effective treatment of the associated cancer with a cancer therapy (e.g., anti-immune checkpoint, chemotherapeutic, and/or radiation therapy). In some embodiments, normal cells are not affected to an extent that causes the normal cells to be unduly injured by the therapies. An increased sensitivity or a reduced sensitivity to a therapeutic treatment is measured according to a known method in the art for the particular treatment and methods described herein below, including, but not limited to, cell proliferative assays (Tanigawa N, Kern D H, Kikasa Y, Morton D L, Cancer Res 1982; 42: 2159-2164), cell death assays (Weisenthal L M, Shoemaker R H, Marsden J A, Dill P L, Baker J A, Moran E M, Cancer Res 1984; 94: 161-173; Weisenthal L M, Lippman M E, Cancer Treat Rep 1985; 69: 615-632; Weisenthal L M, In: Kaspers G J L, Pieters R, Twentyman P R, Weisenthal L M, Veerman A J P, eds. Drug Resistance in Leukemia and Lymphoma. Langhorne, P A: Harwood Academic Publishers, 1993: 415-432; Weisenthal L M, Contrib Gynecol Obstet 1994; 19: 82-90). The sensitivity or resistance may also be measured in animal by measuring the tumor size reduction over a period of time, for example, 6 month for human. A composition or a method sensitizes response to a therapeutic treatment if the increase in treatment sensitivity or the reduction in resistance is 5%, 10%, 15%, 20%, 25%, 30%, 35%, 40%, 45%, 50%, 55%, 60%, 65%, 70%, 75%, 80%, 85%, 90%, 95%, 100%, or more, such 2-fold, 3-fold, 4-fold, 5-fold, 10-fold, 15-fold, 20-fold or more, or any range in between, inclusive, compared to treatment sensitivity or resistance in the absence of such composition or method. The determination of sensitivity or resistance to a therapeutic treatment is routine in the art and within the skill of an ordinarily skilled clinician. It is to be understood that any method described herein for enhancing the efficacy of a cancer therapy can be equally applied to methods for sensitizing hyperproliferative or otherwise cancerous cells (e.g., resistant cells) to the cancer therapy.

[0215] “Short interfering RNA” (siRNA), also referred to herein as “small interfering RNA” is defined as an agent which functions to inhibit expression of a target biomarker nucleic acid, e.g., by RNAi. An siRNA may be chemically synthesized, may be produced by in vitro transcription, or may be produced within a host cell. In one embodiment, siRNA is a double stranded RNA (dsRNA) molecule of about 15 to about 40 nucleotides in length, preferably about 15 to about 28 nucleotides, more preferably about 19 to about 25 nucleotides in length, and more preferably about 19, 20, 21, or 22 nucleotides in length, and may contain a 3′ and/or 5′ overhang on each strand having a length of about 0, 1, 2, 3, 4, or 5 nucleotides. The length of the overhang is independent between the two strands, i.e., the length of the overhang on one strand is not dependent on the length of the overhang on the second strand. Preferably the siRNA is capable of promoting RNA interference through degradation or specific post-transcriptional gene silencing (PTGS) of the target messenger RNA (mRNA).

[0216] In another embodiment, an siRNA is a small hairpin (also called stem loop) RNA (shRNA). In one embodiment, these shRNAs are composed of a short (e.g., 19-25 nucleotide) antisense strand, followed by a 5-9 nucleotide loop, and the analogous sense strand. Alternatively, the sense strand may precede the nucleotide loop structure and the antisense strand may follow. These shRNAs may be contained in plasmids, retroviruses, and lentiviruses and expressed from, for example, the pol III U6 promoter, or another promoter (see, e.g., Stewart, et al. (2003) RNA April; 9(4):493-501 incorporated by reference herein).

[0217] RNA interfering agents, e.g., siRNA molecules, may be administered to a patient having or at risk for having cancer, to inhibit expression of a biomarker gene which is overexpressed in cancer and thereby treat, prevent, or inhibit cancer in the subject.

[0218] The term “small molecule” is a term of the art and includes molecules that are less than about 1000 molecular weight or less than about 500 molecular weight. In one embodiment, small molecules do not exclusively comprise peptide bonds. In another embodiment, small molecules are not oligomeric. Exemplary small molecule compounds which can be screened for activity include, but are not limited to, peptides, peptidomimetics, nucleic acids, carbohydrates, small organic molecules (e.g., polyketides) (Cane et al. (1998) Science 282:63), and natural product extract libraries. In another embodiment, the compounds are small, organic non-peptidic compounds. In a further embodiment, a small molecule is not biosynthetic.

[0219] The term “specific binding” refers to antibody binding to a predetermined antigen. Typically, the antibody binds with an affinity (K_{D}) of approximately less than 10-7 M, such as approximately less than 10⁻⁸ M, 10⁻⁹ μM or 10⁻¹⁰ μM or even lower when determined by surface plasmon resonance (SPR) technology in a BIACORE® assay instrument using an antigen of interest as the analyte and the antibody as the ligand, and binds to the predetermined antigen with an affinity that is at least 1.1-, 1.2-, 1.3-, 1.4-, 1.5-, 1.6-, 1.7-, 1.8-, 1.9-, 2.0-, 2.5-, 3.0-, 3.5-, 4.0-, 4.5-, 5.0-, 6.0-, 7.0-, 8.0-, 9.0-, or 10.0-fold or greater than its affinity for binding to a non-specific antigen (e.g., BSA, casein) other than the predetermined antigen or a closely-related antigen. The phrases “an antibody recognizing an antigen” and “an antibody specific for an antigen” are used interchangeably herein with the term “an antibody which binds specifically to an antigen.” Selective binding is a relative term referring to the ability of an antibody to discriminate the binding of one antigen over another.

[0220] The term “subject” refers to any healthy animal, mammal or human, or any animal, mammal or human afflicted with a cancer, e.g., brain, lung, ovarian, pancreatic, liver, breast, prostate, and/or colorectal cancers, melanoma, multiple myeloma, and the like. The term “subject” is interchangeable with “patient.”

[0221] The term “survival” includes all of the following: survival until mortality, also known as overall survival (wherein said mortality may be either irrespective of cause or tumor related); “recurrence-free survival” (wherein the term recurrence shall include both localized and distant recurrence); metastasis free survival; disease free survival (wherein the term disease shall include cancer and diseases associated therewith). The length of said survival may be calculated by reference to a defined start point (e.g. time of diagnosis or start of treatment) and end point (e.g. death, recurrence or metastasis). In addition, criteria for efficacy of treatment can be expanded to include response to chemotherapy, probability of survival, probability of metastasis within a given time period, and probability of tumor recurrence.

[0222] The term “synergistic effect” refers to the combined effect of two or more cancer agents (e.g., an agent that inhibits binding of a SS18-SSX fusion protein with a H2AK119Ub-marked nucleosome in combination with immunotherapy) can be greater than the sum of the separate effects of the cancer agents/therapies alone.

[0223] The term “T cell” includes CD4⁺ T cells and CD8⁺ T cells. The term T cell also includes both T helper 1 type T cells and T helper 2 type T cells. The term “antigen presenting cell” includes professional antigen presenting cells (e.g., B lymphocytes, monocytes, dendritic cells, Langerhans cells), as well as other antigen presenting cells (e.g., keratinocytes, endothelial cells, astrocytes, fibroblasts, and oligodendrocytes).

[0224] The term “therapeutic effect” refers to a local or systemic effect in animals, particularly mammals, and more particularly humans, caused by a pharmacologically active substance. The term thus means any substance intended for use in the diagnosis, cure, mitigation, treatment or prevention of disease or in the enhancement of desirable physical or mental development and conditions in an animal or human. The phrase “therapeutically-effective amount” means that amount of such a substance that produces some desired local or systemic effect at a reasonable benefit/risk ratio applicable to any treatment. In certain embodiments, a therapeutically effective amount of a compound will depend on its therapeutic index, solubility, and the like. For example, certain compounds discovered by the methods of the present invention may be administered in a sufficient amount to produce a reasonable benefit/risk ratio applicable to such treatment.

[0225] The terms “therapeutically-effective amount” and “effective amount” as used herein means that amount of a compound, material, or composition comprising a compound of the present invention which is effective for producing some desired therapeutic effect in at least a sub-population of cells in an animal at a reasonable benefit/risk ratio applicable to any medical treatment. Toxicity and therapeutic efficacy of subject compounds may be determined by standard pharmaceutical procedures in cell cultures or experimental animals, e.g., for determining the LD₅₀ and the ED₅₀. Compositions that exhibit large therapeutic indices are preferred. In some embodiments, the LD₅₀ (lethal dosage) can be measured and can be, for example, at least 10%, 20%, 30%, 40%, 50%, 60%, 70%, 80%, 90%, 100%, 200%, 300%, 400%, 500%, 600%, 700%, 800%, 900%, 1000% or more reduced for the agent relative to no administration of the agent. Similarly, the ED₅₀ (i.e., the concentration which achieves a half-maximal inhibition of symptoms) can be measured and can be, for example, at least 10%, 20%, 30%, 40%, 50%, 60%, 70%, 80%, 90%, 100%, 200%, 300%, 400%, 500%, 600%, 700%, 800%, 900%, 1000% or more increased for the agent relative to no administration of the agent. Also, Similarly, the IC₅₀ (i.e., the concentration which achieves half-maximal cytotoxic or cytostatic effect on cancer cells) can be measured and can be, for example, at least 10%, 20%, 30%, 40%, 50%, 60%, 70%, 80%, 90%, 100%, 200%, 300%, 400%, 500%, 600%, 700%, 800%, 900%, 1000% or more increased for the agent relative to no administration of the agent. In some embodiments, cancer cell growth in an assay can be inhibited by at least about 10%, 15%, 20%, 25%, 30%, 35%, 40%, 45%, 50%, 55%, 60%, 65%, 70%, 75%, 80%, 85%, 90%, 95%, or even 100%. In another embodiment, at least about a 10%, 15%, 20%, 25%, 30%, 35%, 40%, 45%, 50%, 55%, 60%, 65%, 70%, 75%, 80%, 85%, 90%, 95%, or even 100% decrease in a solid malignancy can be achieved.

[0226] A “transcribed polynucleotide” or “nucleotide transcript” is a polynucleotide (e.g. an mRNA, hnRNA, a cDNA, or an analog of such RNA or cDNA) which is complementary to or homologous with all or a portion of a mature mRNA made by transcription of a biomarker nucleic acid and normal post-transcriptional processing (e.g. splicing), if any, of the RNA transcript, and reverse transcription of the RNA transcript.

[0227] As used herein, the term “unresponsiveness” includes refractivity of cancer cells to therapy or refractivity of therapeutic cells, such as immune cells, to stimulation, e.g., stimulation via an activating receptor or a cytokine. Unresponsiveness can occur, e.g., because of exposure to immunosuppressants or exposure to high doses of antigen. As used herein, the term “anergy” or “tolerance” includes refractivity to activating receptor-mediated stimulation. Such refractivity is generally antigen-specific and persists after exposure to the tolerizing antigen has ceased. For example, anergy in T cells (as opposed to unresponsiveness) is characterized by lack of cytokine production, e.g., IL-2. T cell anergy occurs when T cells are exposed to antigen and receive a first signal (a T cell receptor or CD-3 mediated signal) in the absence of a second signal (a costimulatory signal). Under these conditions, reexposure of the cells to the same antigen (even if reexposure occurs in the presence of a costimulatory polypeptide) results in failure to produce cytokines and, thus, failure to proliferate. Anergic T cells can, however, proliferate if cultured with cytokines (e.g., IL-2). For example, T cell anergy can also be observed by the lack of IL-2 production by T lymphocytes as measured by ELISA or by a proliferation assay using an indicator cell line. Alternatively, a reporter gene construct can be used. For example, anergic T cells fail to initiate IL-2 gene transcription induced by a heterologous promoter under the control of the 5′ IL-2 gene enhancer or by a multimer of the API sequence that can be found within the enhancer (Kang et al. (1992) Science 257:1134).

[0228] As used herein, the term “protein complex” means a composite unit that is a combination of two or more proteins formed by interaction between the proteins. Typically, but not necessarily, a “protein complex” is formed by the binding of two or more proteins together through specific non-covalent binding interactions. However, covalent bonds may also be present between the interacting partners. For instance, the two interacting partners can be covalently crosslinked so that the protein complex becomes more stable. The protein complex may or may not include and/or be associated with other molecules such as nucleic acid, such as RNA or DNA, or lipids or further cofactors or moieties selected from a metal ions, hormones, second messengers, phosphate, sugars. A “protein complex” encompassed by the present invention may also be part of or a unit of a larger physiological protein assembly.

[0229] The term “isolated protein complex” means a protein complex present in a composition or environment that is different from that found in nature, in its native or original cellular or body environment. Preferably, an “isolated protein complex” is separated from at least 50%, more preferably at least 75%, most preferably at least 90% of other naturally co-existing cellular or tissue components. Thus, an “isolated protein complex” may also be a naturally existing protein complex in an artificial preparation or a non-native host cell. An “isolated protein complex” may also be a “purified protein complex”, that is, a substantially purified form in a substantially homogenous preparation substantially free of other cellular components, other polypeptides, viral materials, or culture medium, or, when the protein components in the protein complex are chemically synthesized, free of chemical precursors or by-products associated with the chemical synthesis. A “purified protein complex” typically means a preparation containing preferably at least 75%, more preferably at least 85%, and most preferably at least 95% of a particular protein complex. A “purified protein complex” may be obtained from natural or recombinant host cells or other body samples by standard purification techniques, or by chemical synthesis.

[0230] The term “modified protein complex” refers to a protein complex present in a composition that is different from that found in nature, in its native or original cellular or body environment. The term “modification” as used herein refers to all modifications of a protein or protein complex encompassed by the present invention including cleavage and addition or removal of a group. In some embodiments, the “modified protein complex” comprises at least one subunit that is modified, i.e., different from that found in nature, in its native or original cellular or body environment. The “modified subunit” may be, e.g., a derivative or fragment of the native subunit from which it derives from.

[0231] As used herein, the term “domain” means a functional portion, segment or region of a protein, or polypeptide. “Interaction domain” refers specifically to a portion, segment or region of a protein, polypeptide or protein fragment that is responsible for the physical affinity of that protein, protein fragment or isolated domain for another protein, protein fragment or isolated domain.

[0232] The terms “polypeptide fragment” or “fragment”, when used in reference to a reference polypeptide, refers to a polypeptide in which amino acid residues are deleted as compared to the reference polypeptide itself, but where the remaining amino acid sequence is usually identical to the corresponding positions in the reference polypeptide. Such deletions may occur at the amino-terminus, internally, or at the carboxyl-terminus of the reference polypeptide, or alternatively both. Fragments typically are at least 5, 6, 8 or 10 amino acids long, at least 14 amino acids long, at least 20, 30, 40 or 50 amino acids long, at least 75 amino acids long, or at least 100, 150, 200, 300, 500 or more amino acids long. They can be, for example, at least and/or including 10, 15, 20, 25, 30, 35, 40, 45, 50, 55, 60, 65, 70, 75, 80, 85, 90, 95, 100, 120, 140, 160, 180, 200, 220, 240, 260, 280, 300, 320, 340, 360, 380, 400, 420, 440, 460, 480, 500, 520, 540, 560, 580, 600, 620, 640, 660, 680, 700, 720, 740, 760, 780, 800, 820, 840, 860, 880, 900, 920, 940, 960, 980, 1000, 1020, 1040, 1060, 1080, 1100, 1120, 1140, 1160, 1180, 1200, 1220, 1240, 1260, 1280, 1300, 1320, 1340 or more long so long as they are less than the length of the full-length polypeptide. Alternatively, they can be no longer than and/or excluding such a range so long as they are less than the length of the full-length polypeptide.

[0233] The term “tag” as used herein is meant to be understood in its broadest sense and to include, but is not limited to any suitable enzymatic, fluorescent, or radioactive labels and suitable epitopes, including but not limited to HA-tag, Myc-tag, T7, His-tag, FLAG-tag, Calmodulin binding proteins, glutathione-S-transferase, strep-tag, KT3-epitope, EEF-epitopes, green-fluorescent protein and variants thereof.

[0234] The term “nucleosome” refers to the fundamental unit of chromatin. The term “chromatin” refer to the larger-scale nucleoprotein structure comprising the cellular genome. Cellular chromatin comprises nucleic acid, primarily DNA, and protein, including histones and non-histone chromosomal proteins. The majority of eukaryotic cellular chromatin exists in the form of nucleosomes, wherein a “nucleosome” core comprises approximately 150 base pairs of DNA associated with an octamer comprising two each of histones H2A, H2B, H3 and H4; and linker DNA (of variable length depending on the organism) extends between nucleosome cores. A molecule of histone H1 is generally associated with the linker DNA. For the purposes of the present disclosure, the term “chromatin” is meant to encompass all types of cellular nucleoprotein, both prokaryotic and eukaryotic. Cellular chromatin includes both chromosomal and episomal chromatin.

[0235] The term “histone” refers to highly alkaline proteins found in eukaryotic cell nuclei that package and order DNA into structural units called nucleosomes. They are the chief protein components of chromatin, acting as spools around which DNA winds, and play a role in gene regulation. In certain embodiments, the histone is histone H2A (e.g., human, mouse, rat, and/or Xenopus, optionally canonical Histone H2A). In certain embodiments, the histone is histone H2B (e.g., human, mouse, rat, and/or Xenopus, optionally canonical Histone H2B). As described below, H2A and H2B sequences, variation, and structure-function relationships are well-known in the art and are functionally similar, such that, for example, working examples described herein use Xenopus H2A and H2B sequences because they are structurally and functionally similar to Human H2A and H2B sequences.

[0236] An “accessible region” is a site in cellular chromatin in which a target site present in the nucleic acid can be bound by an exogenous molecule which recognizes the target site. Without wishing to be bound by any particular theory, it is believed that an accessible region is one that is not packaged into a nucleosomal structure. The distinct structure of an accessible region can often be detected by its sensitivity to chemical and enzymatic probes, for example, nucleases The accessibility of chromatin is mediated in part by interactions with SWI/SNF (BAF) complexes via interactions with the nucleosome “acidic patch.” The “acidic patch” of a nucleosome is formed from six H2A and two H2B residues, which together create a highly contoured and negatively charged binding interface on the nucleosome surface. This canonical structural region of nucleosomes is well-known in the art (see, for example, Dann et al. (2017) Nature 548:607-611 and Luger et al. (1997) J. Mol. Biol. 272:301-311) and is described further herein. In certain assays useful according to the present invention, nucleosomal interactions with DNA and/or proteins (e.g., SS18-SSX-containing BAF complexes), can be analyzed. Certain such assays measure changes to DNA lengths. The preferential protection against degradation may be due to the DNA being wrapped around one or more histone proteins, preferably an octomer of histone proteins. The threshold size may be the size of a complete turn of the DNA about a histone core+/−22 bases. The threshold size may be between 100 and 160 bases, preferably between 110 and b 140 bases, more preferably between 120 and 130 bases and ideally 125 bases+/−1 base. The threshold size may be a size equal to or greater than 100 bases, more preferably equal to or greater than 110 bases still more preferably equal to or greater than 120 bases and ideally 125 bases or more.

[0237] Eukaryotes have chromatin arranged around proteins in the form of nucleosomes, which are the smallest subunits of chromatin and include approximately 146-147 base pairs of DNA wrapped around an octamer of core histone proteins (two each of H2A, H2B, H3, and H4). As used herein, the term “Histone H3” refers to the H3 member of the Histone family, which comprises proteins used to form the structure of nucleosomes in eukaryotic cells. Mammalian cells have three known sequence variants of Histone H3 proteins, denoted H3.1, H3.2 and H3.3, that are highly conserved differing in sequence by only a few amino acids.

[0238] As used herein, the term “Histone H3” can refer to H3.1, H3.2, or H3.3 individually or collectively. These amino acid sequences include a methionine as residue number 1 that is cleaved off when the protein is processed. Thus, for example, serine 11 in the Histone H3 amino acid sequences shown in Table 1 below corresponds to serine (Ser) 10 of the present invention. These three protein variants are encoded by at least fifteen different genes/transcripts. Sequences encoding the Histone H3.1 variant are publicly available as HIST1H3A (NM 003529.2; NP_003520.1), HIST1H3B (NM_003537.3; NP 003528.1), HIST1H3C (NM 003531.2; NP_003522.1), HIST1H3D (NM_003530.3; NP 003521.2), HIST1H3E (NM 003532.2; NP_003523.1), HIST1H3F (NM_021018.2; NP 066298.1), HIST1H3G (NM 003534.2; NP_003525.1), HIST1H3H (NM_003536.2; NP_003527.1), HIST1H3I (NM 003533.2; NP_003524.1), and HIST1H3J (NM_003535.2; NP_003526.1). Sequences encoding the Histone H3.2 variant are publicly available as HIST2H3A (NM_001005464.2; NP 001005464.1), HIST2H3C (NM_021059.2; NP_066403.2), and HIST2H3D (NM_001123375.1; NP 001116847.1). Sequences encoding the Histone H3.3 variant are publicly available as H3F3A (NM_002107.3; NP_002098.1) and H3F3B (NM 005324.3; NP_005315.1). See U.S. Pat. Publ. 2012/0202843 for additional details. Moreover, polypeptide sequences for Histone H3 orthologs, as well as nucleic acid sequences that encode such polypeptides, are well-known in many species, and include, for example, Histone H3.1 orthologs in mice (NM_013550.4; NP_038578.2), chimpanzee (XM_527253.4; XP_527253.2), monkey (XM_001088298.2; XP 001088298.1), dog (XM_003434195.1; XP 003434243.1), cow (XM_002697460.1; XP_002697506.1), rat (XM_001055231.2; XP 001055231.1), and zebrafish (NM_001100173.1; NP_001093643.1). Histone H3.2 orthologs in mice (NM_178215.1; NP_835587.1), chimpanzee (XM_524859.4; XP_524859.2), monkey (XM_001084245.2; XP_001084245.1), dog (XM_003640147.1; XP 003640195.1), cow (XM_002685500.1; XP_002685546.1), rat (NM_001107698.1; NP 001101168.1), chicken (XM_001233027.2; XP_001233028.1), and zebrafish (XM_002662732.1; XP_002662778.1). Similarly, Histone H3.3 orthologs in mice (XM_892026.4; XP_897119.3), monkey (XM_001085836.2; XP_001085836.1), cow (NM_001099370.1; NP 001092840.1), rat (NM_053985.2; NP_446437.1), chicken (NM_205296.1; NP_990627.1), and zebrafish (NM_200003.1; NP_956297.1), are well-known. Representative Histone H3 orthologs are provided in Table 1.

[0239] As used herein, the term “Histone H2” can refer to H2A or H2B individually or collectively. The structure of H2A consists of histone fold domain extended by a short alphaC-helix and has both N- and C-terminal tails. The alphaC-helix and C-terminal tail form a docking domain that locks the H2A-H2B dimer onto the surface of H3-H4 tetramer. H2A protein sequences, and nucleic acids encoding same, are well-known in the art and include many useful variants, including canonical H2A, H2A.1, H2A.B, H2A.L, H2A.P, H2A.W, H2A.X, H2A.Z, and macroH2A (see Draizen et al. (2016) Database PMID: 26989147 and HistoneDB 2.0 available on the World Wide Web). The structure of H2B consists of histone fold with a long flexible N-terminal tail which protrudes between the DNA gyres. H2B interats with H4 in the nucleosome vore via four helix bundle motif and alphaC-helix of H2B decorates the nucleosome surface. H2B protein sequences, and nucleic acids ecndogin same, are well-known in the art and include many useful variants, including canonical H2B, H2B.1, H2B.W, H2B.Z, sperm H2B, and subH2B (see Draizen et al. (2016) Database PMID: 26989147 and HistoneDB 2.0 available on the World Wide Web).

[0240] There is a known and definite correspondence between the amino acid sequence of a particular protein and the nucleotide sequences that can code for the protein, as defined by the genetic code (shown below). Likewise, there is a known and definite correspondence between the nucleotide sequence of a particular nucleic acid and the amino acid sequence encoded by that nucleic acid, as defined by the genetic code.

GENETIC CODE

| | |
|---|---|
| Alanine (Ala, A) | GCA, GCC, GCG, GCT |
| Arginine (Arg, R) | AGA, ACG, CGA, CGC, CGG, CGT |
| Asparagine (Asn, N) | AAC, AAT |
| Aspartic acid (Asp, D) | GAC, GAT |
| Cysteine (Cys, C) | TGC, TGT |
| Glutamic acid (Glu, E) | GAA, GAG |
| Glutamine (Gln, Q) | CAA, CAG |
| Glycine (Gly, G) | GGA, GGC, GGG, GGT |
| Histidine (His, H) | CAC, CAT |
| Isoleucine (Ile, I) | ATA, ATC, ATT |
| Leucine (Leu, L) | CTA, CTC, CTG, CTT, TTA, TTG |
| Lysine (Lys, K) | AAA, AAG |
| Methionine (Met, M) | ATG |
| Phenylalanine (Phe, F) | TTC, TTT |
| Proline (Pro, P) | CCA, CCC, CCG, CCT |
| Serine (Ser, S) | AGC, AGT, TCA, TCC, TCG, TCT |
| Threonine (Thr, T) | ACA, ACC, ACG, ACT |
| Tryptophan (Trp, W) | TGG |
| Tyrosine (Tyr, Y) | TAC, TAT |
| Valine (Val, V) | GTA, GTC, GTG, GTT |
| Termination signal (end) | TAA, TAG, TGA |

[0241] An important and well-known feature of the genetic code is its redundancy, whereby, for most of the amino acids used to make proteins, more than one coding nucleotide triplet may be employed (illustrated above). Therefore, a number of different nucleotide sequences may code for a given amino acid sequence. Such nucleotide sequences are considered functionally equivalent since they result in the production of the same amino acid sequence in all organisms (although certain organisms may translate some sequences more efficiently than they do others). Moreover, occasionally, a methylated variant of a purine or pyrimidine may be found in a given nucleotide sequence. Such methylations do not affect the coding relationship between the trinucleotide codon and the corresponding amino acid.

[0242] In view of the foregoing, the nucleotide sequence of a DNA or RNA encoding a biomarker nucleic acid (or any portion thereof) can be used to derive the polypeptide amino acid sequence, using the genetic code to translate the DNA or RNA into an amino acid sequence. Likewise, for polypeptide amino acid sequence, corresponding nucleotide sequences that can encode the polypeptide can be deduced from the genetic code (which, because of its redundancy, will produce multiple nucleic acid sequences for any given amino acid sequence). Thus, description and/or disclosure herein of a nucleotide sequence which encodes a polypeptide should be considered to also include description and/or disclosure of the amino acid sequence encoded by the nucleotide sequence. Similarly, description and/or disclosure of a polypeptide amino acid sequence herein should be considered to also include description and/or disclosure of all possible nucleotide sequences that can encode the amino acid sequence.

[0243] Finally, nucleic acid and amino acid sequence information for the loci and biomarkers of the present invention are well-known in the art and readily available on publicly available databases, such as the National Center for Biotechnology Information (NCBI). In addition, nucleic acid and amino acid sequence information for the SS18, SSX, SS18-SSX fusion proteins of the present invention are provided below.

TABLE 1
SEQ ID NO: 1 Human SSX1 cDNA Sequence variant 1 (NM_001278691.2; CDS:
148-714)

| | |
|---|---|
| 1 | accactgctg ccgacctcgc aaccactgct ttgtctctga atagagacag ggtttcctta |
| 61 | tgttggccga actgggcttg acctcctcgg ctcaagtgat cctcccacct cggcctcgga |
| 121 | actacaggtg agactgctcc tggtgccatg aacggagacg acacctttgc aaagagaccc |
| 181 | agggatgatg ctaaagcatc agagaagaga agcaaggcct ttgatgatat tgccacatac |
| 241 | ttctctaaga aagagtggaa aaagatgaaa tactcggaga aaatcagcta tgtgtatatg |
| 301 | aagagaaact ataaggccat gactaaacta ggtttcaaag tcaccctccc acctttcatg |
| 361 | tgtaataaac aggccacaga cttccagggg aatgattttg ataatgacca taaccgcagg |
| 421 | attcaggttg aacatcctca gatgactttc ggcaggctcc acagaatcat cccgaagatc |
| 481 | atgcccaaga agccagcaga ggacgaaaat gattcgaagg gagtgtcaga agcatctggc |
| 541 | ccacaaaacg atgggaaaca actgcacccc ccaggaaaag caaatatttc tgagaagatt |
| 601 | aataagagat ctggacccaa aagggggaaa catgcctgga cccacagact gcgtgagaga |
| 661 | aagcagctgg tgatttatga agagatcagt gaccctgagg aagatgacga gtaactcccc |
| 721 | tgggggatac gacacatgcc cttgatgaga agcagaacgt ggtgaccttt cacgaacatg |
| 781 | ggcatggctg cggctccctc gtcatcaggt gcatagcaag tgaaagcaag tgttcacaac |
| 841 | ggtgaaactt gagcgtcatt tttcttagtg tgccaagagt tcgatgttag tgtttccatt |
| 901 | gtattttctt acagtgtgcc attctgttag atactatcct tataattgat gagcaagaca |
| 961 | tactgaatgc atatttcggt ttgtgtatcc atgcacctac gtcagaaaac aagtattgtc |
| 1021 | aggtattctc tccatagaac agcactatcc tcatctctcc ccagatgtga ctactgaggg |
| 1081 | cagttctgag tgtttaattt cagacttttt cctctgcatt tacacacaca cacacacaca |
| 1141 | cacgcacaca cacacaccaa gtaccagtat aagcatctcc catctgcttt tcccattgcc |
| 1201 | atgcgtcctg gtcaagcccc cctcactctg tttcctgttc agcatgtact cccctcatcc |
| 1261 | gattcccctg tatcagtcac tgacagttaa taaacctttg caaacgttc |

SEQ ID NO: 2 Human SSX1 cDNA Sequence variant 2 (NM_005635.4; CDS: 62-
628)

| | |
|---|---|
| 1 | accactgctg ccgacctcgc aaccactgct ttgtctctga agtgagactg ctcctggtgc |
| 61 | catgaacgga gacgacacct ttgcaaagag acccagggat gatgctaaag catcagagaa |
| 121 | gagaagcaag gcctttgatg atattgccac atacttctct aagaaagagt ggaaaaagat |
| 181 | gaaatactcg gagaaaatca gctatgtgta tatgaagaga aactataagg ccatgactaa |
| 241 | actaggtttc aaagtcaccc tcccaccttt catgtgtaat aaacaggcca cagacttcca |
| 301 | ggggaatgat tttgataatg accataaccg caggattcag gttgaacatc ctcagatgac |
| 361 | tttcggcagg ctccacagaa tcatcccgaa gatcatgccc aagaagccag cagaggacga |
| 421 | aaatgattcg aagggagtgt cagaagcatc tggcccacaa aacgatggga aacaactgca |
| 481 | ccccccagga aaagcaaata tttctgagaa gattaataag agatctggac ccaaaagggg |
| 541 | gaaacatgcc tggacccaca gactgcgtga gagaaagcag ctggtgattt atgaagagat |
| 601 | cagtgaccct gaggaagatg acgagtaact cccctggggg atacgacaca tgcccttgat |
| 661 | gagaagcaga acgtggtgac ctttcacgaa catgggcatg gctgcggctc cctcgtcatc |
| 721 | aggtgcatag caagtgaaag caagtgttca caacggtgaa acttgagcgt catttttctt |
| 781 | agtgtgccaa gagttcgatg ttagtgtttc cattgtattt tcttacagtg tgccattctg |
| 841 | ttagatacta tccttataat tgatgagcaa gacatactga atgcatattt cggtttgtgt |
| 901 | atccatgcac ctacgtcaga aaacaagtat tgtcaggtat tctctccata gaacagcact |
| 961 | atcctcatct ctccccagat gtgactactg agggcagttc tgagtgttta atttcagact |
| 1021 | ttttcctctg catttacaca cacacacaca cacacacgca cacacacaca ccaagtacca |
| 1081 | gtataagcat ctcccatctg cttttcccat tgccatgcgt cctggtcaag cccccctcac |
| 1141 | tctgtttcct gttcagcatg tactcccctc atccgattcc cctgtatcag tcactgacag |
| 1201 | ttaataaacc tttgcaaacg ttc |

SEQ ID NO: 3 Human SSX1 Amino Acid Sequence isoform 1 (NP_001265620.1
and NP_005626.1)

| | |
|---|---|
| 1 | mngddtfakr prddakasek rskafddiat yfskkewkkm kysekisyvy mkrnykamtk |
| 61 | lgfkvtlppf mcnkqatdfq gndfdndhnr riqvehpqmt fgrlhriipk impkkpaede |
| 121 | ndskgvseas gpqndgkqlh ppgkanisek inkrsgpkrg khawthrlre rkqlviyeei |
| 181 | sdpeedde |

SEQ ID NO: 4 Human SSX2 cDNA Sequence variant 1 (NM_003147.5; CDS: 137-
808)

| | |
|---|---|
| 1 | gggattggct actttaagtt cagagtacgc atgctctgac tttctctctc tttcgattct |
| 61 | tccatactca gagtacgcac ggtctgattt tctctttgga ttcttccaaa atcagagtca |
| 121 | gactgctccc ggtgccatga acggagacga cgcctttgca aggagaccca cggttggtgc |
| 181 | tcaaatacca gagaagatcc aaaaggcctt cgatgatatt gccaaatact tctctaagga |
| 241 | agagtgggaa aagatgaaag cctcggagaa aatcttctat gtgtatatga agagaaagta |
| 301 | tgaggctatg actaaactag gtttcaaggc caccctccca cctttcatgt gtaataaacg |
| 361 | ggccgaagac ttccagggga atgatttgga taatgaccct aaccgtggga atcaggttga |
| 421 | acgtcctcag atgactttcg gcaggctcca gggaatctcc ccgaagatca tgcccaagaa |
| 481 | gccagcagag gaaggaaatg attcggagga agtgccagaa gcatctggcc cacaaaatga |
| 541 | tgggaaagag ctgtgccccc cgggaaaacc aactacctct gagaagattc acgagagatc |
| 601 | tggaaatagg gaggcccaag aaaaggaaga gagacgcgga acagctcatc ggtggagcag |
| 661 | tcagaacaca cacaacattg gtcgattcag tttgtcaact tctatgggtg cagttcatgg |
| 721 | tacccccaaa acaattacac acaacaggga cccaaaaggg gggaacatgc ctggacccac |
| 781 | agactgcgtg agagaaaaca gctggtgatt tatgaagaga tcagcgaccc tgaggaagat |
| 841 | gacgagtaac tcccctcagg gatacgacac atgcccatga tgagaagcag aacgtggtga |
| 901 | cctttcacga acatgggcat ggctgcggac ccctcgtcat caggtgcata gcaagtgaaa |
| 961 | gcaagtgttc acaacagtga aaagttgagc gtcatttttc ttagtgtgcc aagagttcga |
| 1021 | tgttagcgtt tacgttgtat tttcttacac tgtgtcattc tgttagatac taacattttc |
| 1081 | attgatgagc aagacatact taatgcatat tttggtttgt gtatccatgc acctacctta |
| 1141 | gaaaacaagt attgtcggtt acctctgcat ggaacagcat taccctcctc tctccccaga |
| 1201 | tgtgactact gagggcagtt ctgagtgttt aatttcagat tttttcctct gcatttacac |
| 1261 | acacacgcac acaaaccaca ccacacacac acacacacac acacacacac acacacacac |
| 1321 | acaccaagta ccagtataag catctgccat ctgcttttcc cattgccatg cgtcctggtc |
| 1381 | aagctcccct cactctgttt cctggtcagc atgtactccc ctcatccgat tcccctgtag |
| 1441 | cagtcactga cagttaataa acctttgcaa acgttcaaaa aaaaaaaaaa aaaa |

SEQ ID NO: 5 Human SSX2 Amino Acid Sequence isoform 1 (NP_003138.3)

| | |
|---|---|
| 1 | mngddafarr ptvgaqipek iqkafddiak yfskeewekm kasekifyvy mkrkyeamtk |
| 61 | lgfkatlppf mcnkraedfq gndldndpnr gnqverpqmt fgrlqgispk impkkpaeeg |
| 121 | ndseevpeas gpqndgkelc ppgkpttsek ihersgnrea qekeerrgta hrwssqnthn |
| 181 | igrfslstsm gavhgtpkti thnrdpkggn mpgptdcvre nsw |

SEQ ID NO: 6 Human SSX2 cDNA Sequence variant 2 (NM_175698.2; CDS: 137-
703)

| | |
|---|---|
| 1 | gggattggct actttaagtt cagagtacgc atgctctgac tttctctctc tttcgattct |
| 61 | tccatactca gagtacgcac ggtctgattt ttctttgga ttcttccaaa atcagagtca |
| 121 | gactgctccc ggtgccatga acggagacga cgcctttgca aggagaccca cggttggtgc |
| 181 | tcaaatacca gagaagatcc aaaaggcctt cgatgatatt gccaaatact tctctaagga |
| 241 | agagtgggaa aagatgaaag cctcggagaa aatcttctat gtgtatatga agagaaagta |
| 301 | tgaggctatg actaaactag gtttcaaggc caccctccca cctttcatgt gtaataaacg |
| 361 | ggccgaagac ttccagggga atgatttgga taatgaccct aaccgtggga atcaggttga |
| 421 | acgtcctcag atgactttcg gcaggctcca gggaatctcc ccgaagatca tgcccaagaa |
| 481 | gccagcagag gaaggaaatg attcggagga agtgccagaa gcatctggcc cacaaaatga |
| 541 | tgggaaagag ctgtgccccc cgggaaaacc aactacctct gagaagattc acgagagatc |
| 601 | tggacccaaa aggggggaac atgcctggac ccacagactg cgtgagagaa aacagctggt |
| 661 | gatttatgaa gagatcagcg accctgagga agatgacgag taactcccct cagggatacg |
| 721 | acacatgccc atgatgagaa gcagaacgtg gtgacctttc acgaacatgg gcatggctgc |
| 781 | ggacccctcg tcatcaggtg catagcaagt gaaagcaagt gttcacaaca gtgaaaagtt |
| 841 | gagcgtcatt tttcttagtg tgccaagagt tcgatgttag cgtttacgtt gtattttctt |
| 901 | acactgtgtc attctgttag atactaacat tttcattgat gagcaagaca tacttaatgc |
| 961 | atattttggt ttgtgtatcc atgcacctac cttagaaaac aagtattgtc ggttacctct |
| 1021 | gcatggaaca gcattaccct cctctctccc cagatgtgac tactgagggc agttctgagt |
| 1081 | gtttaatttc agattttttc ctctgcattt acacacacac gcacacaaac cacaccacac |
| 1141 | acacacacac acacacacac acacacacac acacacacca agtaccagta taagcatctg |
| 1201 | ccatctgctt ttcccattgc catgcgtcct ggtcaagctc ccctcactct gtttcctggt |
| 1261 | cagcatgtac tcccctcatc cgattcccct gtagcagtca ctgacagtta ataaaccttt |
| 1321 | gcaaacgttc aaaaaaaaaa aaaaaaaa |

SEQ ID NO: 7 Human SSX2 Amino Acid Sequence isoform 2 (NP_783629.1)

| | |
|---|---|
| 1 | mngddafarr ptvgaqipek iqkafddiak yfskeewekm kasekifyvy mkrkyeamtk |
| 61 | lgfkatlppf mcnkraedfq gndldndpnr gnqverpqmt fgrlqgispk impkkpaeeg |
| 121 | ndseevpeas gpqndgkelc ppgkpttsek ihersgpkrg ehawthrlre rkqlviyeei |
| 181 | sdpeedde |

SEQ ID NO: 8 Human SSX2 cDNA Sequence variant 3 (NM_001278697.1; CDS:
137-781)

| | |
|---|---|
| 1 | gggattggct actttaagtt cagagtacgc atgctctgac tttctctctc tttcgattct |
| 61 | tccatactca gagtacgcac ggtctgattt tctctttgga ttcttccaaa atcagagtca |
| 121 | gactgctccc ggtgccatga acggagacga cgcctttgca aggagaccca cggttggtgc |
| 181 | tcaaatacca gagaagatcc aaaaggcctt cgatgatatt gccaaatact tctctaagga |
| 241 | agagtgggaa aagatgaaag cctcggagaa aatcttctat gtgtatatga agagaaagta |
| 301 | tgaggctatg actaaactag gtttcaaggc caccctccca cctttcatgt gtaataaacg |
| 361 | ggccgaagac ttccagggga atgatttgga taatgaccct aaccgtggga atcaggttga |
| 421 | acgtcctcag atgactttcg gcaggctcca gggaatctcc ccgaagatca tgcccaagaa |
| 481 | gccagcagag gaaggaaatg attcggagga agtgccagaa gcatctggcc cacaaaatga |
| 541 | tgggaaagag ctgtgccccc cgggaaaacc aactacctct gagaagattc acgagagatc |
| 601 | tggaaatagg gaggcccaag aaaaggaaga gagacgcgga acagctcatc ggtggagcag |
| 661 | tcagaacaca cacaacattg gacccaaaag gggggaacat gcctggaccc acagactgcg |
| 721 | tgagagaaaa cagctggtga tttatgaaga gatcagcgac cctgaggaag atgacgagta |
| 781 | actcccctca gggatacgac acatgcccat gatgagaagc agaacgtggt gacctttcac |
| 841 | gaacatgggc atggctgcgg acccctcgtc atcaggtgca tagcaagtga aagcaagtgt |
| 901 | tcacaacagt gaaaagttga gcgtcatttt tcttagtgtg ccaagagttc gatgttagcg |
| 961 | tttacgttgt attttcttac actgtgtcat tctgttagat actaacattt tcattgatga |
| 1021 | gcaagacata cttaatgcat attttggttt gtgtatccat gcacctacct tagaaaacaa |
| 1081 | gtattgtcgg ttacctctgc atggaacagc attaccctcc tctctcccca gatgtgacta |
| 1141 | ctgagggcag ttctgagtgt ttaatttcag attttttcct ctgcatttac acacacacgc |
| 1201 | acacaaacca caccacacac acacacacac acacacacac acacacacac acacaccaag |
| 1261 | taccagtata agcatctgcc atctgctttt cccattgcca tgcgtcctgg tcaagctccc |
| 1321 | ctcactctgt ttcctggtca gcatgtactc ccctcatccg attcccctgt agcagtcact |
| 1381 | gacagttaat aaacctttgc aaacgttcaa aaaaaaaaaa aaaaaa |

SEQ ID NO: 9 Human SSX2 Amino Acid Sequence isoform 3 (NP_001265626.1)

| | |
|---|---|
| 1 | mngddafarr ptvgaqipek iqkafddiak yfskeewekm kasekifyvy mkrkyeamtk |
| 61 | lgfkatlppf mcnkraedfq gndldndpnr gnqverpqmt fgrlqgispk impkkpaeeg |
| 121 | ndseevpeas gpqndgkelc ppgkpttsek ihersgnrea qekeerrgta hrwssqnthn |
| 181 | igpkrgehaw thrlrerkql viyeeisdpe edde |

SEQ ID NO: 10 Human SSX2B cDNA Sequence variant 1 (NM_001278701.2; CDS:
88-759)

| | |
|---|---|
| 1 | ctttcgattc ttccatactc agagtacgca cggtctgatt ttctctttgg attcttccaa |
| 61 | aatcagagtc agactgctcc cggtgccatg aacggagacg acgcctttgc aaggagaccc |
| 121 | acggttggtg ctcaaatacc agagaagatc caaaaggcct tcgatgatat tgccaaatac |
| 181 | ttctctaagg aagagtggga aaagatgaaa gcctcggaga aaatcttcta tgtgtatatg |
| 241 | aagagaaagt atgaggctat gactaaacta ggtttcaagg ccaccctccc acctttcatg |
| 301 | tgtaataaac gggccgaaga cttccagggg aatgatttgg ataatgaccc taaccgtggg |
| 361 | aatcaggttg aacgtcctca gatgactttc ggcaggctcc agggaatctc cccgaagatc |
| 421 | atgcccaaga agccagcaga ggaaggaaat gattcggagg aagtgccaga agcatctggc |
| 481 | ccacaaaatg atgggaaaga gctgtgcccc ccgggaaaac caactacctc tgagaagatt |
| 541 | cacgagagat ctggaaatag ggaggcccaa gaaaaggaag agagacgcgg aacagctcat |
| 601 | cggtggagca gtcagaacac acacaacatt ggtcgattca gtttgtcaac ttctatgggt |
| 661 | gcagttcatg gtacccccaa aacaattaca cacaacaggg acccaaaagg ggggaacatg |
| 721 | cctggaccca cagactgcgt gagagaaaac agctggtgat ttatgaagag atcagcgacc |
| 781 | ctgaggaaga tgacgagtaa ctcccctcag ggatacgaca catgcccatg atgagaagca |
| 841 | gaacgtggtg acctttcacg aacatgggca tggctgcgga cccctcgtca tcaggtgcat |
| 901 | agcaagtgaa agcaagtgtt cacaacagtg aaaagttgag cgtcattttt cttagtgtgc |
| 961 | caagagttcg atgttagcgt ttacgttgta ttttcttaca ctgtgtcatt ctgttagata |
| 1021 | ctaacatttt cattgatgag caagacatac ttaatgcata ttttggtttg tgtatccatg |
| 1081 | cacctacctt agaaaacaag tattgtcggt tacctctgca tggaacagca ttaccctect |
| 1141 | ctctccccag atgtgactac tgagggcagt tctgagtgtt taatttcaga ttttttcctc |
| 1201 | tgcatttaca cacacacgca cacaaaccac accacacaca cacacacaca cacacacaca |
| 1261 | cacacacaca cacaccaagt accagtataa gcatctgcca tctgcttttc ccattgccat |
| 1321 | gcgtcctggt caagctcccc tcactctgtt tcctggtcag catgtactcc cctcatccga |
| 1381 | ttcccctgta gcagtcactg acagttaata aacctttgca aacgttc |

SEQ ID NO: 11 Human SSX2B Amino Acid Sequence isoform 1 (NP_001265630.1)

| | |
|---|---|
| 1 | mngddafarr ptvgaqipek iqkafddiak yfskeewekm kasekifyvy mkrkyeamtk |
| 61 | lgfkatlppf mcnkraedfq gndldndpnr gnqverpqmt fgrlqgispk impkkpaeeg |
| 121 | ndseevpeas gpqndgkelc ppgkpttsek ihersgnrea qekeerrgta hrwssqnthn |
| 181 | igrfslstsm gavhgtpkti thnrdpkggn mpgptdcvre nsw |

SEQ ID NO: 12 Human SSX2B cDNA Sequence variant 2 (NM_001164417.3; CDS:
88-654)

| | |
|---|---|
| 1 | ctttcgattc ttccatactc agagtacgca cggtctgatt ttctctttgg attcttccaa |
| 61 | aatcagagtc agactgctcc cggtgccatg aacggagacg acgcctttgc aaggagaccc |
| 121 | acggttggtg ctcaaatacc agagaagatc caaaaggcct tcgatgatat tgccaaatac |
| 181 | ttctctaagg aagagtggga aaagatgaaa gcctcggaga aaatcttcta tgtgtatatg |
| 241 | aagagaaagt atgaggctat gactaaacta ggtttcaagg ccaccctccc acctttcatg |
| 301 | tgtaataaac gggccgaaga cttccagggg aatgatttgg ataatgaccc taaccgtggg |
| 361 | aatcaggttg aacgtcctca gatgactttc ggcaggctcc agggaatctc cccgaagatc |
| 421 | atgcccaaga agccagcaga ggaaggaaat gattcggagg aagtgccaga agcatctggc |
| 481 | ccacaaaatg atgggaaaga gctgtgcccc ccgggaaaac caactacctc tgagaagatt |
| 541 | cacgagagat ctggacccaa aaggggggaa catgcctgga cccacagact gcgtgagaga |
| 601 | aaacagctgg tgatttatga agagatcagc gaccctgagg aagatgacga gtaactcccc |
| 661 | tcagggatac gacacatgcc catgatgaga agcagaacgt ggtgaccttt cacgaacatg |
| 721 | ggcatggctg cggacccctc gtcatcaggt gcatagcaag tgaaagcaag tgttcacaac |
| 781 | agtgaaaagt tgagcgtcat ttttcttagt gtgccaagag ttcgatgtta gcgtttacgt |
| 841 | tgtattttct tacactgtgt cattctgtta gatactaaca ttttcattga tgagcaagac |
| 901 | atacttaatg catattttgg tttgtgtatc catgcaccta ccttagaaaa caagtattgt |
| 961 | cggttacctc tgcatggaac agcattaccc tectctctcc ccagatgtga ctactgaggg |
| 1021 | cagttctgag tgtttaattt cagatttttt cctctgcatt tacacacaca cgcacacaaa |
| 1081 | ccacaccaca cacacacaca cacacacaca cacacacaca cacacacacc aagtaccagt |
| 1141 | ataagcatct gccatctgct tttcccattg ccatgcgtcc tggtcaagct cccctcactc |
| 1201 | tgtttcctgg tcagcatgta ctcccctcat ccgattcccc tgtagcagtc actgacagtt |
| 1261 | aataaacctt tgcaaacgtt c |

SEQ ID NO: 13 Human SSX2B Amino Acid Sequence isoform 2 (NP_001157889.1)

| | |
|---|---|
| 1 | mngddafarr ptvgaqipek iqkafddiak yfskeewekm kasekifyvy mkrkyeamtk |
| 61 | lgfkatlppf mcnkraedfq gndldndpnr gnqverpqmt fgrlqgispk impkkpaeeg |
| 121 | ndseevpeas gpqndgkelc ppgkpttsek ihersgpkrg ehawthrlre rkqlviyeei |
| 181 | sdpeedde |

SEQ ID NO: 14 Human SSX2B cDNA Sequence variant 3 (NM_001278702.2; CDS:
88-732)

| | |
|---|---|
| 1 | ctttcgattc ttccatactc agagtacgca cggtctgatt ttctctttgg attcttccaa |
| 61 | aatcagagtc agactgctcc cggtgccatg aacggagacg acgcctttgc aaggagaccc |
| 121 | acggttggtg ctcaaatacc agagaagatc caaaaggcct tcgatgatat tgccaaatac |
| 181 | ttctctaagg aagagtggga aaagatgaaa gcctcggaga aaatcttcta tgtgtatatg |
| 241 | aagagaaagt atgaggctat gactaaacta ggtttcaagg ccaccctccc acctttcatg |
| 301 | tgtaataaac gggccgaaga cttccagggg aatgatttgg ataatgaccc taaccgtggg |
| 361 | aatcaggttg aacgtcctca gatgactttc ggcaggctcc agggaatctc cccgaagatc |
| 421 | atgcccaaga agccagcaga ggaaggaaat gattcggagg aagtgccaga agcatctggc |
| 481 | ccacaaaatg atgggaaaga gctgtgcccc ccgggaaaac caactacctc tgagaagatt |
| 541 | cacgagagat ctggaaatag ggaggcccaa gaaaaggaag agagacgcgg aacagctcat |
| 601 | cggtggagca gtcagaacac acacaacatt ggacccaaaa ggggggaaca tgcctggacc |
| 661 | cacagactgc gtgagagaaa acagctggtg atttatgaag agatcagcga ccctgaggaa |
| 721 | gatgacgagt aactcccctc agggatacga cacatgccca tgatgagaag cagaacgtgg |
| 781 | tgacctttca cgaacatggg catggctgcg gacccctcgt catcaggtgc atagcaagtg |
| 841 | aaagcaagtg ttcacaacag tgaaaagttg agcgtcattt ttcttagtgt gccaagagtt |
| 901 | cgatgttagc gtttacgttg tattttctta cactgtgtca ttctgttaga tactaacatt |
| 961 | ttcattgatg agcaagacat acttaatgca tattttggtt tgtgtatcca tgcacctacc |
| 1021 | ttagaaaaca agtattgtcg gttacctctg catggaacag cattaccctc ctctctcccc |
| 1081 | agatgtgact actgagggca gttctgagtg tttaatttca gattttttcc tctgcattta |
| 1141 | cacacacacg cacacaaacc acaccacaca cacacacaca cacacacaca cacacacaca |
| 1201 | cacacaccaa gtaccagtat aagcatctgc catctgcttt tcccattgcc atgcgtcctg |
| 1261 | gtcaagctcc cctcactctg tttcctggtc agcatgtact cccctcatcc gattcccctg |
| 1321 | tagcagtcac tgacagttaa taaacctttg caaacgttc |

SEQ ID NO: 15 Human SSX2B Amino Acid Sequence isoform 3 (NP_001265631.1)

| | |
|---|---|
| 1 | mngddafarr ptvgaqipek iqkafddiak yfskeewekm kasekifyvy mkrkyeamtk |
| 61 | lgfkatlppf mcnkraedfq gndldndpnr gnqverpqmt fgrlqgispk impkkpaeeg |
| 121 | ndseevpeas gpqndgkelc ppgkpttsek ihersgnrea qekeerrgta hrwssqnthn |
| 181 | igpkrgehaw thrlrerkql viyeeisdpe edde |

SEQ ID NO: 16 Human SSX4 cDNA Sequence variant 1 (NM_005636.4; CDS: 47-
613)

| | |
|---|---|
| 1 | gcccttttga ttcttccaca atcagggtga gactgctccc agtgccatga acggagacga |
| 61 | cgcctttgca aggagaccca gggatgatgc tcaaatatca gagaagttac gaaaggcctt |
| 121 | cgatgatatt gccaaatact tctctaagaa agagtgggaa aagatgaaat cctcggagaa |
| 181 | aatcgtctat gtgtatatga agctaaacta tgaggtcatg actaaactag gtttcaaggt |
| 241 | caccctccca cctttcatgc gtagtaaacg ggctgcagac ttccacggga atgattttgg |
| 301 | taacgatcga aaccacagga atcaggttga acgtcctcag atgactttcg gcagcctcca |
| 361 | gagaatcttc ccgaagatca tgcccaagaa gccagcagag gaagaaaatg gtttgaagga |
| 421 | agtgccagag gcatctggcc cacaaaatga tgggaaacag ctgtgccccc cgggaaatcc |
| 481 | aagtaccttg gagaagatta acaagacatc tggacccaaa agggggaaac atgcctggac |
| 541 | ccacagactg cgtgagagaa agcagctggt ggtttatgaa gagatcagcg accctgagga |
| 601 | agatgacgag taactcccct cggggatatg acacatgccc atgatgagaa gcagaacgtg |
| 661 | gtgacctttc acgaacatgg gcatggctgc ggacccctcg tcatcaggtg catagcaagt |
| 721 | gaaagcaagt gttcacaaca gtgaaaagtt gagcgtcatt tttcttagtg tgccaagagt |
| 781 | tcgatgttgg cgtttccgct gtattttctt gcagtgtgcc attctgttag acattagcgt |
| 841 | tttcgttgat gagcaagaca tgcttaatgc atatttcggc ttgtgtatcc atgcacctac |
| 901 | ctcagaaaac aagtattgtc aggtattctc tccatagaac agcactaccc tectctctcc |
| 961 | ccagatgtga ctactgaggg gaggtctgag tgtttaattt ccgatttttt cctctgcatt |
| 1021 | tacacacaca ccacacacgc acacacacac accaagtacc agtataagca tctcccatct |
| 1081 | gcttttctcc attgccatgc gacctggtca agcccccctc actctgtttc ctgttcagca |
| 1141 | tgtactcccc tcatccgatt ccgttgtatc agtcactgac agttaataaa cctttgcaaa |
| 1201 | cgttcccca |

SEQ ID NO: 17 Human SSX4 Amino Acid Sequence isoform 1 (NP_005627.1)

| | |
|---|---|
| 1 | mngddafarr prddaqisek lrkafddiak yfskkewekm kssekivyvy mklnyevmtk |
| 61 | lgfkvtlppf mrskraadfh gndfgndrnh rnqverpqmt fgslqrifpk impkkpaeee |
| 121 | nglkevpeas gpqndgkqlc ppgnpstlek inktsgpkrg khawthrlre rkqlvvyeei |
| 181 | sdpeedde |

SEQ ID NO: 18 Human SSX4 cDNA Sequence variant 2 (NM_175729.1; CDS: 59-

| | |
|---|---|
| 520) | |
| 1 | acacgccgat ttgccctttt gattcttcca caatcagggt gagactgctc ccagtgccat |
| 61 | gaacggagac gacgcctttg caaggagacc cagggatgat gctcaaatat cagagaagtt |
| 121 | acgaaaggcc ttcgatgata ttgccaaata cttctctaag aaagagtggg aaaagatgaa |
| 181 | atcctcggag aaaatcgtct atgtgtatat gaagctaaac tatgaggtca tgactaaact |
| 241 | aggtttcaag gtcaccctcc cacctttcat gcgtagtaaa cgggctgcag acttccacgg |
| 301 | gaatgatttt ggtaacgatc gaaaccacag gaatcaggtt gaacgtcctc agatgacttt |
| 361 | cggcagcctc cagagaatct tcccgaagga cccaaaaggg ggaaacatgc ctggacccac |
| 421 | agactgcgtg agagaaagca gctggtggtt tatgaagaga tcagcgaccc tgaggaagat |
| 481 | gacgagtaac tcccctcggg gatatgacac atgcccatga tgagaagcag aacgtggtga |
| 541 | cctttcacga acatgggcat ggctgcggac ccctcgtcat caggtgcata gcaagtgaaa |
| 601 | gcaagtgttc acaacagtga aaagttgagc gtcatttttc ttagtgtgcc aagagttcga |
| 661 | tgttggcgtt tccgctgtat tttcttgcag tgtgccattc tgttagacat tagcgttttc |
| 721 | gttgatgagc aagacatgct taatgcatat ttcggcttgt gtatccatgc acctacctca |
| 781 | gaaaacaagt attgtcaggt attctctcca tagaacagca ctaccctect ctctccccag |
| 841 | atgtgactac tgaggggagg tctgagtgtt taatttccga ttttttcctc tgcatttaca |
| 901 | cacacaccac acacgcacac acacacacca agtaccagta taagcatctc ccatctgctt |
| 961 | ttctccattg ccatgcgacc tggtcaagcc cccctcactc tgtttcctgt tcagcatgta |
| 1021 | ctcccctcat ccgattccgt tgtatcagtc actgacagtt aataaacctt tgcaaacgtt |
| 1081 | caaaaaaaaa aaaaaaaaaa aaaaaaaaaa aaaa |

SEQ ID NO: 19 Human SSX4 Amino Acid Sequence isoform 2 (NP_783856.1)

| | |
|---|---|
| 1 | mngddafarr prddaqisek lrkafddiak yfskkewekm kssekivyvy mklnyevmtk |
| 61 | lgfkvtlppf mrskraadfh gndfgndrnh rnqverpqmt fgslqrifpk dpkggnmpgp |
| 121 | tdcvressww fmkrsatlrk mtsnsprgyd tcp |

SEQ ID NO: 20 Human SSX4B cDNA Sequence variant 1 (NM_001034832.3; CDS:
70-636)

| | |
|---|---|
| 1 | tcagagtacg cacacgccga tttgcccttt tgattcttcc acaatcaggg tgagactgct |
| 61 | cccagtgcca tgaacggaga cgacgccttt gcaaggagac ccagggatga tgctcaaata |
| 121 | tcagagaagt tacgaaaggc cttcgatgat attgccaaat acttctctaa gaaagagtgg |
| 181 | gaaaagatga aatcctcgga gaaaatcgtc tatgtgtata tgaagctaaa ctatgaggtc |
| 241 | atgactaaac taggtttcaa ggtcaccctc ccacctttca tgcgtagtaa acgggctgca |
| 301 | gacttccacg ggaatgattt tggtaacgat cgaaaccaca ggaatcaggt tgaacgtcct |
| 361 | cagatgactt tcggcagcct ccagagaatc ttcccgaaga tcatgcccaa gaagccagca |
| 421 | gaggaagaaa atggtttgaa ggaagtgcca gaggcatctg gcccacaaaa tgatgggaaa |
| 481 | cagctgtgcc ccccgggaaa tccaagtacc ttggagaaga ttaacaagac atctggaccc |
| 541 | aaaaggggga aacatgcctg gacccacaga ctgcgtgaga gaaagcagct ggtggtttat |
| 601 | gaagagatca gcgaccctga ggaagatgac gagtaactcc cctcggggat atgacacatg |
| 661 | cccatgatga gaagcagaac gtggtgacct ttcacgaaca tgggcatggc tgcggacccc |
| 721 | tcgtcatcag gtgcatagca agtgaaagca agtgttcaca acagtgaaaa gttgagcgtc |
| 781 | atttttctta gtgtgccaag agttcgatgt tggcgtttcc gctgtatttt cttgcagtgt |
| 841 | gccattctgt tagacattag cgttttogtt gatgagcaag acatgcttaa tgcatatttc |
| 901 | ggcttgtgta tccatgcacc tacctcagaa aacaagtatt gtcaggtatt ctctccatag |
| 961 | aacagcacta ccctcctctc tccccagatg tgactactga ggggaggtct gagtgtttaa |
| 1021 | tttccgattt tttcctctgc atttacacac acaccacaca cgcacacaca cacaccaagt |
| 1081 | accagtataa gcatctccca tctgcttttc tccattgcca tgcgacctgg tcaagccccc |
| 1141 | ctcactctgt ttcctgttca gcatgtactc ccctcatccg attccgttgt atcagtcact |
| 1201 | gacagttaat aaacctttgc aaacgttcaa aaaaaaaaaa aaaa |

SEQ ID NO: 21 Human SSX4B Amino Acid Sequence isoform 1 (NP_001030004.1)

| | |
|---|---|
| 1 | mngddafarr prddaqisek lrkafddiak yfskkewekm kssekivyvy mklnyevmtk |
| 61 | lgfkvtlppf mrskraadfh gndfgndrnh rnqverpqmt fgslqrifpk impkkpaeee |
| 121 | nglkevpeas gpqndgkqlc ppgnpstlek inktsgpkrg khawthrlre rkqlvvyeei |
| 181 | sdpeedde |

SEQ ID NO: 22 Human SSX4B cDNA Sequence variant 2 (NM_001040612.2; CDS:
70-531)

| | |
|---|---|
| 1 | tcagagtacg cacacgccga tttgcccttt tgattcttcc acaatcaggg tgagactgct |
| 61 | cccagtgcca tgaacggaga cgacgccttt gcaaggagac ccagggatga tgctcaaata |
| 121 | tcagagaagt tacgaaaggc cttcgatgat attgccaaat acttctctaa gaaagagtgg |
| 181 | gaaaagatga aatcctcgga gaaaatcgtc tatgtgtata tgaagctaaa ctatgaggtc |
| 241 | atgactaaac taggtttcaa ggtcaccctc ccacctttca tgcgtagtaa acgggctgca |
| 301 | gacttccacg ggaatgattt tggtaacgat cgaaaccaca ggaatcaggt tgaacgtcct |
| 361 | cagatgactt tcggcagcct ccagagaatc ttcccgaagg acccaaaagg gggaaacatg |
| 421 | cctggaccca cagactgcgt gagagaaagc agctggtggt ttatgaagag atcagcgacc |
| 481 | ctgaggaaga tgacgagtaa ctcccctcgg ggatatgaca catgcccatg atgagaagca |
| 541 | gaacgtggtg acctttcacg aacatgggca tggctgcgga cccctcgtca tcaggtgcat |
| 601 | agcaagtgaa agcaagtgtt cacaacagtg aaaagttgag cgtcattttt cttagtgtgc |
| 661 | caagagttcg atgttggcgt ttccgctgta ttttcttgca gtgtgccatt ctgttagaca |
| 721 | ttagcgtttt cgttgatgag caagacatgc ttaatgcata tttcggcttg tgtatccatg |
| 781 | cacctacctc agaaaacaag tattgtcagg tattctctcc atagaacage actaccctcc |
| 841 | tctctcccca gatgtgacta ctgaggggag gtctgagtgt ttaatttccg attttttcct |
| 901 | ctgcatttac acacacacca cacacgcaca cacacacacc aagtaccagt ataagcatct |
| 961 | cccatctgct tttctccatt gccatgcgac ctggtcaagc ccccctcact ctgtttcctg |
| 1021 | ttcagcatgt actcccctca tccgattccg ttgtatcagt cactgacagt taataaacct |
| 1081 | ttgcaaacgt tcaaaaaaaa aaaaaaaa |

SEQ ID NO: 23 Human SSX4B Amino Acid Sequence isoform 2 (NP_001035702.1)

| | |
|---|---|
| 1 | mngddafarr prddaqisek lrkafddiak yfskkewekm kssekivyvy mklnyevmtk |
| 61 | lgfkvtlppf mrskraadfh gndfgndrnh rnqverpqmt fgslqrifpk dpkggnmpgp |
| 121 | tdcvressww fmkrsatlrk mtsnsprgyd tcp |

SEQ ID NO: 24 Human SSX3 cDNA Sequence (NM_021014.4; CDS: 91-657)

| | |
|---|---|
| 1 | ctctttcgat tcttccatac tcaagagtac gcacggtctg attttctctt tggattcttc |
| 61 | caaaatcaga gtcagactac tccctgtgcc atgaacggag atgacacctt tgcaaggaga |
| 121 | cccacggttg gtgctcaaat accagagaag atacaaaagg ccttcgatga tattgccaaa |
| 181 | tacttctcta aggaagagtg ggaaaagatg aaagtctcgg agaaaatcgt ctatgtgtat |
| 241 | atgaagagaa agtatgaggc catgactaaa ctaggtttca aggccatcct cccatctttc |
| 301 | atgcgtaata aacgggtcac agacttccag gggaatgatt ttgataatga ccctaaccgt |
| 361 | gggaatcagg ttcaacgtcc tcagatgact ttcggcaggc tccagggaat cttcccgaag |
| 421 | atcatgccca agaagccagc agaggaagga aatgtttcga aggaagtgcc agaagcatct |
| 481 | ggcccacaaa acgatgggaa acagctgtgc cccccgggaa aaccaactac ctctgagaag |
| 541 | attaacatga tatctggacc caaaaggggg gaacatgcct ggacccacag actgcgtgag |
| 601 | agaaagcagc tggtgattta tgaagagatc agcgatcctg aggaagatga tgagtaactc |
| 661 | cccttgggga tatgacacat gcccatgatg agaagcagaa cgtggtgacc tttcacgaac |
| 721 | atgggcatgg ctgtggaccc ctcgtcatca ggtgcatagc aagtgaaagc aagtgttcac |
| 781 | aacagtgaaa agttgagcgt catttttctt agtgtgccaa gagtacgata ttagcgtttc |
| 841 | cattgtattt tcttgaagtg tgtcattctg ttagatatta acattttcac tgatgagcaa |
| 901 | gacatactta atgcatattt tggtttgtgt atccatgcac ctaccttaga aaacaagtat |
| 961 | tgtcagttac ctctgcatgg aacagcatta ccctcctctc tccctagatg tgactactga |
| 1021 | gggcagttct gagtgtttaa tttcagattt tttcctctgc atttacacac acacacaaac |
| 1081 | cacaccacac acacacacac acacacacag acacacacca agtaccagta taagcatctc |
| 1141 | ccatctgctt ttcccattgc catgcgtcct ggtcaggctt ccctcactct gtttcctggt |
| 1201 | cagcatgtac tcccctcatc cgattcccct gtagcagtca ctgacagtaa ataaaccttt |
| 1261 | gcaaacgttc |

SEQ ID NO: 25 Human SSX3 Amino Acid Sequence (NP_066294.1)

| | |
|---|---|
| 1 | mngddtfarr ptvgaqipek iqkafddiak yfskeewekm kvsekivyvy mkrkyeamtk |
| 61 | lgfkailpsf mrnkrvtdfq gndfdndpnr gnqvqrpqmt fgrlqgifpk impkkpaeeg |
| 121 | nvskevpeas gpqndgkqlc ppgkpttsek inmisgpkrg ehawthrlre rkqlviyeei |
| 181 | sdpeedde |

SEQ ID NO: 26 Human SSX5 cDNA Sequence variant 1 (NM_021015.4; CDS:
86 . . . 775)

| | |
|---|---|
| 1 | ctctctctct cgatttttcc acagagtacg cacgctctga ttgtttcgat tcttccaaaa |
| 61 | tcagagacag agtgctcccg gtgccatgaa cggagacgat gcctttgtac ggagacctag |
| 121 | ggttggttct caaataccag agaagatgca aaagcatccc tggagacaag tctgtgaccg |
| 181 | tggaatacat ttggtgaatc tcagtccgtt ctggaaggtg ggaagagagc cagccagcag |
| 241 | cattaaagct ctactgtgtg gcaggggaga agctagggcc ttcgatgata ttgccaaata |
| 301 | cttctctgag aaagagtggg aaaagatgaa agcctcggag aaaatcatct atgtgtatat |
| 361 | gaagagaaag tatgaggcca tgactaaact aggtttcaag gccaccctcc cacctttcat |
| 421 | gcgtaataaa cgggtcgcag acttccaggg gaatgatttt gataatgacc ctaaccgtgg |
| 481 | gaatcaggtt gaacatcctc agatgacttt cggcaggctc cagggaatct tcccgaagat |
| 541 | cacgcccgag aagccagcag aggaaggaaa tgattcgaag ggagtgccag aagcatctgg |
| 601 | cccacagaac aatgggaaac agctgcgccc ctcaggaaaa ctaaatacct ctgagaaggt |
| 661 | taacaagaca tctggaccca aaagggggaa acatgcctgg acccacagag tgcgtgagag |
| 721 | aaagcaactg gtgatttatg aagagatcag cgaccctcag gaagatgacg agtaactccc |
| 781 | ctcggggata tgacacatgc ccatgatgag aagcagaacg tggtgacctt tcacgaacat |
| 841 | gggcatggct gcggatccct cgtcatcagg tgtatagcaa gtgaaagcaa gtgttcacaa |
| 901 | cagtgaaaag ttgagcgtca tttttcttag tgtgccaaga gttcgatgtt agtgtttctg |
| 961 | ttgtattttg ttacagtgtg ccattctgtt agatattagc gttttcactg atgagcaaga |
| 1021 | catacttaat gcatatttca gtttgtgtat ccatgcacct acctcagaaa acaagtatcg |
| 1081 | tcaggtattc tctgcataga acaacactac cctcctctct tcccagatgt gaccactgag |
| 1141 | ggcagttctg agtgtttaat ttcagatttt ttcctctgca tttacacaaa cacacacaca |
| 1201 | tgccacacag acacacatgc gcgcgcgcgc gcacacacac acacacacac acacacacac |
| 1261 | acacacacac caagtaccag tataggcatc tcccaactgc ttttccccat gtgtcctggt |
| 1321 | caagcccccc tcactctgtt tcctgttcag catgtactcc cctcatccga ttcccctcta |
| 1381 | tcagtcactg ccagttaata aacctttgca aacgtt |

SEQ ID NO: 27 Human SSX5 Amino Acid Sequence isoform 1 (NP_066295.3)

| | |
|---|---|
| 1 | mngddafvrr prvgsqipek mqkhpwrqvc drgihlvnls pfwkvgrepa ssikallcgr |
| 61 | gearafddia kyfsekewek mkasekiiyv ymkrkyeamt klgfkatlpp fmrnkrvadf |
| 121 | qgndfdndpn rgnqvehpqm tfgrlqgifp kitpekpaee gndskgvpea sgpqnngkql |
| 181 | rpsgklntse kvnktsgpkr gkhawthrvr erkqlviyee isdpqedde |

SEQ ID NO: 28 Human SSX5 cDNA Sequence variant 2 (NM_175723.1; CDS:
54 . . . 620)

| | |
|---|---|
| 1 | cgctctgatt gtttcgattc ttccaaaatc agagacagag tgctcccggt gccatgaacg |
| 61 | gagacgatgc ctttgtacgg agacctaggg ttggttctca aataccagag aagatgcaaa |
| 121 | aggccttcga tgatattgcc aaatacttct ctgagaaaga gtgggaaaag atgaaagcct |
| 181 | cggagaaaat catctatgtg tatatgaaga gaaagtatga ggccatgact aaactaggtt |
| 241 | tcaaggccac cctcccacct ttcatgcgta ataaacgggt cgcagacttc caggggaatg |
| 301 | attttgataa tgaccctaac cgtgggaatc aggttgaaca tcctcagatg actttcggca |
| 361 | ggctccaggg aatcttcccg aagatcacgc ccgagaagcc agcagaggaa ggaaatgatt |
| 421 | cgaagggagt gccagaagca tctggcccac agaacaatgg gaaacagctg cgcccctcag |
| 481 | gaaaactaaa tacctctgag aaggttaaca agacatctgg acccaaaagg gggaaacatg |
| 541 | cctggaccca cagagtgcgt gagagaaagc aactggtgat ttatgaagag atcagcgacc |
| 601 | ctcaggaaga tgacgagtaa ctcccctcgg ggatatgaca catgcccatg atgagaagca |
| 661 | gaacgtggtg acctttcacg aacatgggca tggctgcgga tccctcgtca tcaggtgtat |
| 721 | agcaagtgaa agcaagtgtt cacaacagtg aaaagttgag cgtcattttt cttagtgtgc |
| 781 | caagagttcg atgttagtgt ttctgttgta ttttgttaca gtgtgccatt ctgttagata |
| 841 | ttagcgtttt cactgatgag caagacatac ttaatgcata tttcagtttg tgtatccatg |
| 901 | cacctacctc agaaaacaag tatcgtcagg tattctctgc atagaacaac actaccctcc |
| 961 | tctcttccca gatgtgacca ctgagggcag ttctgagtgt ttaatttcag attttttcct |
| 1021 | ctgcatttac acaaacacac acacatgcca cacagacaca catgcgcgcg cgcgcgcaca |
| 1081 | cacacacaca cacacacaca cacacacaca cacaccaagt accagtatag gcatctccca |
| 1141 | actgcttttc cccatgtgtc ctggtcaagc ccccctcact ctgtttcctg ttcagcatgt |
| 1201 | actcccctca tccgattccc ctctatcagt cactgccagt taataaacct ttgcaaacgt |
| 1261 | taaaaaaaaa aaaaaa |

SEQ ID NO: 29 Human SSX5 Amino Acid Sequence isoform 2 (NP_783729.1)

| | |
|---|---|
| 1 | mngddafvrr prvgsqipek mqkafddiak yfsekewekm kasekiiyvy mkrkyeamtk |
| 61 | lgfkatlppf mrnkrvadfq gndfdndpnr gnqvehpqmt fgrlqgifpk itpekpaeeg |
| 121 | ndskgvpeas gpqnngkqlr psgklntsek vnktsgpkrg khawthrvre rkqlviyeei |
| 181 | sdpqedde |

SEQ ID NO: 30 Human SSX7 cDNA Sequence (NM_173358.2. CDS: 160-726)

| | |
|---|---|
| 1 | ccaggctcca gggacagaac cttctcaaag tgggggtgga gactctgatt ttcccgccta |
| 61 | aagcatcccc tgggattggc tactttaagt tcagagtatg catgctctga ctttctctct |
| 121 | cgattcttcc atactcagag tcagactgct cctggtgcca tgaacggaga cgacgccttt |
| 181 | gcaaggagac ctagggctgg tgctcaaata ccagagaaga tccaaaagtc cttcgatgat |
| 241 | attgccaaat acttctctaa gaaagagtgg gaaaagatga aatccttgga gaaaatcagc |
| 301 | tatgtgtata tgaagagaaa gtatgaggcc atgactaaac taggcttcaa ggccaccctc |
| 361 | ccacctttca tgcataatac aggggccaca gacctccagg ggaatgattt tgataatgac |
| 421 | cgtaaccaag ggaatcaggt tgaacgtcct cagatgactt tttgcaggct ccagagaatc |
| 481 | ttcccgaaga tcatgcccaa gaagccagca gaggaaggaa atgattcgaa gggagtgcca |
| 541 | gaagcatctg gctcacagaa cgatgggaaa cacctgtgcc ctccaggaaa accaagtacc |
| 601 | tctgagaaga ttaacaagac atccggaccc aaaaggggga aacatgcctg gacccacaga |
| 661 | ctgcgtgaga gaaagcagct ggtgatttat gaagagatca gcgaccctga agaagacgac |
| 721 | gagtaactcc cctcggggat acgacatatg cccatgatga gaagcagaac gtggtgacct |
| 781 | ttcacgaaca tgggcatggc tgcggacccc tcgtcatcag gtgcatagca agtgaaagca |
| 841 | agtgttcaca acagtgaaaa gttgagcgtc gtttttctta gtgtgacaag agttcgatgt |
| 901 | tagtgtttcc attgtatttt cttacagtgt gccattctgt tagatattag cgttttcatt |
| 961 | gatgagcaag acatgcttaa tgtgtatttc ggtttgtgta tccatgcacc tacctcagaa |
| 1021 | agcaagtata gtcaggtatt ctctccatag aacagcacta ccctcctctc tccccagatg |
| 1081 | tgactactga gggcagatct gagtgtttaa tttccgattt tcccctctgc atttacacac |
| 1141 | cagacacaca aacacacaca cacagacaca cacacacaca gacacaccaa gtaccagtat |
| 1201 | aagcatctcc catatgcttt tccccattgc catgagtcct ggtcaagccc cccttcaatt |
| 1261 | tgtttcctgt tcagcatgta ctcccctcct ctgattcccc gtatcagtca ctgacagtta |
| 1321 | atacaccttt gcaaacgttc |

SEQ ID NO: 31 Human SSX7 Amino Acid Sequence (NP_775494.1)

| | |
|---|---|
| 1 | mngddafarr pragaqipek iqksfddiak yfskkewekm kslekisyvy mkrkyeamtk |
| 61 | lgfkatlppf mhntgatdlq gndfdndrnq gnqverpqmt fcrlqrifpk impkkpaeeg |
| 121 | ndskgvpeas gsqndgkhlc ppgkpstsek inktsgpkrg khawthrlre rkqlviyeei |
| 181 | sdpeedde |

SEQ ID NO: 32 Human SS18 cDNA Sequence variant 1 (NM_001007559.2;
CDS: 79-1335)

| | |
|---|---|
| 1 | gagaggccgg cgtctctccc ccagtttgcc gttcacccgg agcgctcggg acttgccgat |
| 61 | agtggtgacg gcggcaacat gtctgtggct ttcgcggccc cgaggcagcg aggcaagggg |
| 121 | gagatcactc ccgctgcgat tcagaagatg ttggatgaca ataaccatct tattcagtgt |
| 181 | ataatggact ctcagaataa aggaaagacc tcagagtgtt ctcagtatca gcagatgttg |
| 241 | cacacaaact tggtatacct tgctacaata gcagattcta atcaaaatat gcagtctctt |
| 301 | ttaccagcac cacccacaca gaatatgcct atgggtcctg gagggatgaa tcagagcggc |
| 361 | cctcccccac ctccacgctc tcacaacatg ccttcagatg gaatggtagg tgggggtcct |
| 421 | cctgcaccgc acatgcagaa ccagatgaac ggccagatgc ctgggcctaa ccatatgcct |
| 481 | atgcagggac ctggacccaa tcaactcaat atgacaaaca gttccatgaa tatgccttca |
| 541 | agtagccatg gatccatggg aggttacaac cattctgtgc catcatcaca gagcatgcca |
| 601 | gtacagaatc agatgacaat gagtcaggga caaccaatgg gaaactatgg tcccagacca |
| 661 | aatatgagta tgcagccaaa ccaaggtcca atgatgcatc agcagcctcc ttctcagcaa |
| 721 | tacaatatgc cacagggagg cggacagcat taccaaggac agcagccacc tatgggaatg |
| 781 | atgggtcaag ttaaccaagg caatcatatg atgggtcaga gacagattcc tccctataga |
| 841 | cctcctcaac agggcccacc acagcagtac tcaggccagg aagactatta cggggaccaa |
| 901 | tacagtcatg gtggacaagg tcctccagaa ggcatgaacc agcaatatta ccctgatggt |
| 961 | cataatgatt acggttatca gcaaccgtcg tatcctgaac aaggctacga taggccttat |
| 1021 | gaggattcct cacaacatta ctacgaagga ggaaattcac agtatggcca acagcaagat |
| 1081 | gcataccagg gaccacctcc acaacaggga tatccacccc agcagcagca gtacccaggg |
| 1141 | cagcaaggtt acccaggaca gcagcagggc tacggtcctt cacagggtgg tccaggtcct |
| 1201 | cagtatccta actacccaca gggacaaggt cagcagtatg gaggatatag accaacacag |
| 1261 | cctggaccac cacagccacc ccagcagagg ccttatggat atgaccaggg acagtatgga |
| 1321 | aattaccagc agtgaaaaag tacttacatt ccagtagcca gtatctatta gcagccatat |
| 1381 | tgtcacctca gcactgtgga cacctccctg tgaagagatc cttccattcc atctagtttt |
| 1441 | tggaaaaacc ttgtggataa gtggctgttt catcagtaag cagcctttgt ggtttagtta |
| 1501 | taaaaggctt tagtagctca aaaatactct tgatttcaca tttctactct agatggcaac |
| 1561 | attggacaga aaatgcaatg acataaccaa tttgtaatga ttttggaact gtgtttcaaa |
| 1621 | tggactgtta cagactgaaa ggtgtgaaca gctttgtatg tttatgaagg gtaagggaat |
| 1681 | ttaatacttt tccacagatt tttttgtaag gggaagaggg aaatgtacac tttttacagc |
| 1741 | agcaatattt tgtatattat gtttatttca tgtggtgaat atgcaaggcg gtacactacg |
| 1801 | cactggacag catcagaaat cctctgttaa tgtggactgg aacatggtag atgcttgatt |
| 1861 | gttttggtct caaaatggtg tgctataaag ataaaggtga ggggaagaca aagcacacca |
| 1921 | tatgtccact gttctgttct catagaggaa attcaaatcc cttttatcta ttagataatc |
| 1981 | aagggcactg tgatacagtt ttgagtaaaa agacattttt taaaagcctt ccagttttgt |
| 2041 | ggattaaacc tttttataaa gatcatttat aatactgttt taaaatgtga ggcaataaga |
| 2101 | attactttgt gttggatctg aggaggcttt ggtaaaacag tttcatctaa atgaaagtgg |
| 2161 | taatcctctt ctaaaatagc aataactgaa aatgaaagtg ttaattttac cttgtttgag |
| 2221 | ttatcaggga acttagtaag taatatcaaa gcattttata aatgatatca aagaagagtc |
| 2281 | aacattgatc cagtcatttt attttgtaat attgagggat aattggttat taaactgaat |
| 2341 | agttcaggag actttacaaa cctttgtttc aactttctta tctggaaata atatcattta |
| 2401 | taaagggaca cttttatgtt tttccctttt ttatgttggt tgatataaca caaagagata |
| 2461 | tttaggaaaa tgcttattga tgaggtttat tctatctgtt tttaaagcac cgaggttgca |
| 2521 | ttctagataa ccttgtttat tagcatggca tattttaatc attatttgag actgtcctgt |
| 2581 | gcctgattat tttagctaaa ttcagggaga ttgcgtgggg caggaaagca tgcattgaaa |
| 2641 | aatttctaac cacggttatt taagcataat ctgaaaacat ctagcccaaa ggtaagttgc |
| 2701 | tattttcatc acagttgcct atgcccaggg aataagatgt attctttata attgaattgg |
| 2761 | tttttcccac gtctaactgg aaacaaaaca gaaggggcgt cataaatttg aataagcaga |
| 2821 | acatactgtt ctcaacatac tgtaatcaaa aggaggaatt tcagtgggtc tctgtgtgtg |
| 2881 | tatgagagag agagtgtgtg tttgtgtgtt tcaaggtcag aacaggtttt tttgtttttg |
| 2941 | ttttttgttc tttgtttttt tttttgagat ggagtcttgc tcttgtcgcc caggctggag |
| 3001 | tgcagtggcg caatctcagc tcactgcaac ctccgcctcc caggttcaag cagttctcct |
| 3061 | gcctcagcct cctgagtagc tgggatgaca ggcacccgcc accacaccca gctaattttt |
| 3121 | gtacttttag tagagacgag gtttcgccat gttggccagg ctggtctcga actcctgacc |
| 3181 | tcaggtgatc cacccgcctc ggccttccaa agtgctggga ttacaggcgt gagccaccgt |
| 3241 | gcctggccag aataggtttt ttctttcaac ttgatcagta gaaaatggac atcaagtttg |
| 3301 | aacagataaa tcatggacag ccttattgtg attgaaatgc ttgtaggttc tgtgccaatt |
| 3361 | ttccaccact gtgtactttg ttgctattta aaactgtatc aactctaacg gaagaataaa |
| 3421 | ttatttgtga ttttaaaaaa |

SEQ ID NO: 33 Human SS18 Amino Acid Sequence isoform 1 (NP_001007560.1)

| | |
|---|---|
| 1 | msvafaaprq rgkgeitpaa iqkmlddnnh liqcimdsqn kgktsecsqy qqmlhtnlvy |
| 61 | latiadsnqn mqsllpappt qnmpmgpggm nqsgpppppr shnmpsdgmv gggppaphmq |
| 121 | nqmngqmpgp nhmpmqgpgp nglnmtnssm nmpssshgsm ggynhsvpss qsmpvqnqmt |
| 181 | msqgqpmgny gprpnmsmqp nqgpmmhqqp psqqynmpqg ggqhyqgqqp pmgmmgqvnq |
| 241 | gnhmmgqrqi ppyrppqqgp pqqysgqedy ygdqyshggq gppegmnqqy ypdghndygy |
| 301 | qqpsypeggy drpyedssqh yyeggnsayg qqqdayqgpp pqqgyppqqq qypgqqgypg |
| 361 | qqqgygpsqg gpgpqypnyp qgqgqqyggy rptqpgppqp pqqrpygydq gqygnyqq |

SEQ ID NO: 34 Human SS18 cDNA Sequence variant 2 (NM_005637.3)

| | |
|---|---|
| 1 | gagaggccgg cgtctctccc ccagtttgcc gttcacccgg agcgctcggg acttgccgat |
| 61 | agtggtgacg gcggcaacat gtctgtggct ttcgcggccc cgaggcagcg aggcaagggg |
| 121 | gagatcactc ccgctgcgat tcagaagatg ttggatgaca ataaccatct tattcagtgt |
| 181 | ataatggact ctcagaataa aggaaagacc tcagagtgtt ctcagtatca gcagatgttg |
| 241 | cacacaaact tggtatacct tgctacaata gcagattcta atcaaaatat gcagtctctt |
| 301 | ttaccagcac cacccacaca gaatatgcct atgggtcctg gagggatgaa tcagagcggc |
| 361 | cctcccccac ctccacgctc tcacaacatg ccttcagatg gaatggtagg tgggggtcct |
| 421 | cctgcaccgc acatgcagaa ccagatgaac ggccagatgc ctgggcctaa ccatatgcct |
| 481 | atgcagggac ctggacccaa tcaactcaat atgacaaaca gttccatgaa tatgccttca |
| 541 | agtagccatg gatccatggg aggttacaac cattctgtgc catcatcaca gagcatgcca |
| 601 | gtacagaatc agatgacaat gagtcaggga caaccaatgg gaaactatgg tcccagacca |
| 661 | aatatgagta tgcagccaaa ccaaggtcca atgatgcatc agcagcctcc ttctcagcaa |
| 721 | tacaatatgc cacagggagg cggacagcat taccaaggac agcagccacc tatgggaatg |
| 781 | atgggtcaag ttaaccaagg caatcatatg atgggtcaga gacagattcc tccctataga |
| 841 | cctcctcaac agggcccacc acagcagtac tcaggccagg aagactatta cggggaccaa |
| 901 | tacagtcatg gtggacaagg tcctccagaa ggcatgaacc agcaatatta ccctgatgga |
| 961 | aattcacagt atggccaaca gcaagatgca taccagggac cacctccaca acagggatat |
| 1021 | ccaccccagc agcagcagta cccagggcag caaggttacc caggacagca gcagggctac |
| 1081 | ggtccttcac agggtggtcc aggtcctcag tatcctaact acccacaggg acaaggtcag |
| 1141 | cagtatggag gatatagacc aacacagcct ggaccaccac agccacccca gcagaggcct |
| 1201 | tatggatatg accagggaca gtatggaaat taccagcagt gaaaaagtac ttacattcca |
| 1261 | gtagccagta tctattagca gccatattgt cacctcagca ctgtggacac ctccctgtga |
| 1321 | agagatcctt ccattccatc tagtttttgg aaaaaccttg tggataagtg gctgtttcat |
| 1381 | cagtaagcag cctttgtggt ttagttataa aaggctttag tagctcaaaa atactcttga |
| 1441 | tttcacattt ctactctaga tggcaacatt ggacagaaaa tgcaatgaca taaccaattt |
| 1501 | gtaatgattt tggaactgtg tttcaaatgg actgttacag actgaaaggt gtgaacagct |
| 1561 | ttgtatgttt atgaagggta agggaattta atacttttcc acagattttt ttgtaagggg |
| 1621 | aagagggaaa tgtacacttt ttacagcagc aatattttgt atattatgtt tatttcatgt |
| 1681 | ggtgaatatg caaggcggta cactacgcac tggacagcat cagaaatcct ctgttaatgt |
| 1741 | ggactggaac atggtagatg cttgattgtt ttggtctcaa aatggtgtgc tataaagata |
| 1801 | aaggtgaggg gaagacaaag cacaccatat gtccactgtt ctgttctcat agaggaaatt |
| 1861 | caaatccctt ttatctatta gataatcaag ggcactgtga tacagttttg agtaaaaaga |
| 1921 | cattttttaa aagccttcca gttttgtgga ttaaaccttt ttataaagat catttataat |
| 1981 | actgttttaa aatgtgaggc aataagaatt actttgtgtt ggatctgagg aggctttggt |
| 2041 | aaaacagttt catctaaatg aaagtggtaa tcctcttcta aaatagcaat aactgaaaat |
| 2101 | gaaagtgtta attttacctt gtttgagtta tcagggaact tagtaagtaa tatcaaagca |
| 2161 | ttttataaat gatatcaaag aagagtcaac attgatccag tcattttatt ttgtaatatt |
| 2221 | gagggataat tggttattaa actgaatagt tcaggagact ttacaaacct ttgtttcaac |
| 2281 | tttcttatct ggaaataata tcatttataa agggacactt ttatgttttt ccctttttta |
| 2341 | tgttggttga tataacacaa agagatattt aggaaaatgc ttattgatga ggtttattct |
| 2401 | atctgttttt aaagcaccga ggttgcattc tagataacct tgtttattag catggcatat |
| 2461 | tttaatcatt atttgagact gtcctgtgcc tgattatttt agctaaattc agggagattg |
| 2521 | cgtggggcag gaaagcatgc attgaaaaat ttctaaccac ggttatttaa gcataatctg |
| 2581 | aaaacatcta gcccaaaggt aagttgctat tttcatcaca gttgcctatg cccagggaat |
| 2641 | aagatgtatt ctttataatt gaattggttt ttcccacgtc taactggaaa caaaacagaa |
| 2701 | ggggcgtcat aaatttgaat aagcagaaca tactgttctc aacatactgt aatcaaaagg |
| 2761 | aggaatttca gtgggtctct gtgtgtgtat gagagagaga gtgtgtgttt gtgtgtttca |
| 2821 | aggtcagaac aggttttttt gtttttgttt tttgttcttt gttttttttt ttgagatgga |
| 2881 | gtcttgctct tgtcgcccag gctggagtgc agtggcgcaa tctcagctca ctgcaacctc |
| 2941 | cgcctcccag gttcaagcag ttctcctgcc tcagcctect gagtagctgg gatgacaggc |
| 3001 | acccgccacc acacccagct aatttttgta cttttagtag agacgaggtt tcgccatgtt |
| 3061 | ggccaggctg gtctcgaact cctgacctca ggtgatccac ccgcctcggc cttccaaagt |
| 3121 | gctgggatta caggcgtgag ccaccgtgcc tggccagaat aggttttttc tttcaacttg |
| 3181 | atcagtagaa aatggacatc aagtttgaac agataaatca tggacagcct tattgtgatt |
| 3241 | gaaatgcttg taggttctgt gccaattttc caccactgtg tactttgttg ctatttaaaa |
| 3301 | ctgtatcaac tctaacggaa gaataaatta tttgtgattt taaaaaa |

SEQ ID NO: 35 Human SS18 Amino Acid Sequence isoform 2 (NP_005628.2)

| | |
|---|---|
| 1 | msvafaaprq rgkgeitpaa iqkmlddnnh liqcimdsqn kgktsecsqy qqmlhtnlvy |
| 61 | latiadsnqn mqsllpappt qnmpmgpggm nqsgpppppr shnmpsdgmv gggppaphmq |
| 121 | nqmngqmpgp nhmpmqgpgp nqlnmtnssm nmpssshgsm ggynhsvpss qsmpvqnqmt |
| 181 | msqgqpmgny gprpnmsmqp nqgpmmhqqp psqqynmpqg ggqhyqgqqp pmgmmgqvnq |
| 241 | gnhmmgqrqi ppyrppqqgp pqqysgqedy ygdqyshggq gppegmnqqy ypdgnsqygq |
| 301 | qqdayqgppp qqgyppqqqq ypgqqgypgq qqgygpsqgg pgpqypnypq gqgqqyggyr |
| 361 | ptqpgppqpp qqrpygydqg qygnyqq |

SEQ ID NO: 36 Human SS18 cDNA Sequence variant 3 (NM_001308201.1; CDS:
123-1310)

| | |
|---|---|
| 1 | ccttccacct ctgccctatc tcggcagatg ctccacggat ttgcacgaac tcccgagtct |
| 61 | tgacctccct cccctctccg ggctgccggg acaactcggg gcggccactc ttgccaggag |
| 121 | gcatgttgga tgacaataac catcttattc agtgtataat ggactctcag aataaaggaa |
| 181 | agacctcaga gtgttctcag tatcagcaga tgttgcacac aaacttggta taccttgcta |
| 241 | caatagcaga ttctaatcaa aatatgcagt ctcttttacc agcaccaccc acacagaata |
| 301 | tgcctatggg tcctggaggg atgaatcaga gcggccctcc cccacctcca cgctctcaca |
| 361 | acatgccttc agatggaatg gtaggtgggg gtcctcctgc accgcacatg cagaaccaga |
| 421 | tgaacggcca gatgcctggg cctaaccata tgcctatgca gggacctgga cccaatcaac |
| 481 | tcaatatgac aaacagttcc atgaatatgc cttcaagtag ccatggatcc atgggaggtt |
| 541 | acaaccattc tgtgccatca tcacagagca tgccagtaca gaatcagatg acaatgagtc |
| 601 | agggacaacc aatgggaaac tatggtccca gaccaaatat gagtatgcag ccaaaccaag |
| 661 | gtccaatgat gcatcagcag cctccttctc agcaatacaa tatgccacag ggaggcggac |
| 721 | agcattacca aggacagcag ccacctatgg gaatgatggg tcaagttaac caaggcaatc |
| 781 | atatgatggg tcagagacag attcctccct atagacctcc tcaacagggc ccaccacagc |
| 841 | agtactcagg ccaggaagac tattacgggg accaatacag tcatggtgga caaggtcctc |
| 901 | cagaaggcat gaaccagcaa tattaccctg atggtcataa tgattacggt tatcagcaac |
| 961 | cgtcgtatcc tgaacaaggc tacgataggc cttatgagga ttcctcacaa cattactacg |
| 1021 | aaggaggaaa ttcacagtat ggccaacagc aagatgcata ccagggacca cctccacaac |
| 1081 | agggatatcc accccagcag cagcagtacc cagggcagca aggttaccca ggacagcagc |
| 1141 | agggctacgg tccttcacag ggtggtccag gtcctcagta tcctaactac ccacagggac |
| 1201 | aaggtcagca gtatggagga tatagaccaa cacagcctgg accaccacag ccaccccagc |
| 1261 | agaggcctta tggatatgac cagggacagt atggaaatta ccagcagtga aaaagtactt |
| 1321 | acattccagt agccagtatc tattagcagc catattgtca cctcagcact gtggacacct |
| 1381 | ccctgtgaag agatccttcc attccatcta gtttttggaa aaaccttgtg gataagtggc |
| 1441 | tgtttcatca gtaagcagcc tttgtggttt agttataaaa ggctttagta gctcaaaaat |
| 1501 | actcttgatt tcacatttct actctagatg gcaacattgg acagaaaatg caatgacata |
| 1561 | accaatttgt aatgattttg gaactgtgtt tcaaatggac tgttacagac tgaaaggtgt |
| 1621 | gaacagcttt gtatgtttat gaagggtaag ggaatttaat acttttccac agattttttt |
| 1681 | gtaaggggaa gagggaaatg tacacttttt acagcagcaa tattttgtat attatgttta |
| 1741 | tttcatgtgg tgaatatgca aggcggtaca ctacgcactg gacagcatca gaaatcctct |
| 1801 | gttaatgtgg actggaacat ggtagatgct tgattgtttt ggtctcaaaa tggtgtgcta |
| 1861 | taaagataaa ggtgagggga agacaaagca caccatatgt ccactgttct gttctcatag |
| 1921 | aggaaattca aatccctttt atctattaga taatcaaggg cactgtgata cagttttgag |
| 1981 | taaaaagaca ttttttaaaa gccttccagt tttgtggatt aaaccttttt ataaagatca |
| 2041 | tttataatac tgttttaaaa tgtgaggcaa taagaattac tttgtgttgg atctgaggag |
| 2101 | gctttggtaa aacagtttca tctaaatgaa agtggtaatc ctcttctaaa atagcaataa |
| 2161 | ctgaaaatga aagtgttaat tttaccttgt ttgagttatc agggaactta gtaagtaata |
| 2221 | tcaaagcatt ttataaatga tatcaaagaa gagtcaacat tgatccagtc attttatttt |
| 2281 | gtaatattga gggataattg gttattaaac tgaatagttc aggagacttt acaaaccttt |
| 2341 | gtttcaactt tcttatctgg aaataatatc atttataaag ggacactttt atgtttttcc |
| 2401 | cttttttatg ttggttgata taacacaaag agatatttag gaaaatgctt attgatgagg |
| 2461 | tttattctat ctgtttttaa agcaccgagg ttgcattcta gataaccttg tttattagca |
| 2521 | tggcatattt taatcattat ttgagactgt cctgtgcctg attattttag ctaaattcag |
| 2581 | ggagattgcg tggggcagga aagcatgcat tgaaaaattt ctaaccacgg ttatttaagc |
| 2641 | ataatctgaa aacatctagc ccaaaggtaa gttgctattt tcatcacagt tgcctatgcc |
| 2701 | cagggaataa gatgtattct ttataattga attggttttt cccacgtcta actggaaaca |
| 2761 | aaacagaagg ggcgtcataa atttgaataa gcagaacata ctgttctcaa catactgtaa |
| 2821 | tcaaaaggag gaatttcagt gggtctctgt gtgtgtatga gagagagagt gtgtgtttgt |
| 2881 | gtgtttcaag gtcagaacag gtttttttgt ttttgttttt tgttctttgt tttttttttt |
| 2941 | gagatggagt cttgctcttg tcgcccaggc tggagtgcag tggcgcaatc tcagctcact |
| 3001 | gcaacctccg cctcccaggt tcaagcagtt ctcctgcctc agcctcctga gtagctggga |
| 3061 | tgacaggcac ccgccaccac acccagctaa tttttgtact tttagtagag acgaggtttc |
| 3121 | gccatgttgg ccaggctggt ctcgaactcc tgacctcagg tgatccaccc gcctcggcct |
| 3181 | tccaaagtgc tgggattaca ggcgtgagcc accgtgcctg gccagaatag gttttttctt |
| 3241 | tcaacttgat cagtagaaaa tggacatcaa gtttgaacag ataaatcatg gacagcctta |
| 3301 | ttgtgattga aatgcttgta ggttctgtgc caattttcca ccactgtgta ctttgttgct |
| 3361 | atttaaaact gtatcaactc taacggaaga ataaattatt tgtgatttta aaaaa |

SEQ ID NO: 37 Human SS18 Amino Sequence isoform 3 (NP_001295130.1)

| | |
|---|---|
| 1 | mlddnnhliq cimdsqnkgk tsecsqyqqm lhtnlvylat iadsnqnmqs llpapptqnm |
| 61 | pmgpggmnqs gppppprshn mpsdgmvggg ppaphmqnqm ngqmpgpnhm pmqgpgpnql |
| 121 | nmtnssmnmp ssshgsmggy nhsvpssqsm pvqnqmtmsq gqpmgnygpr pnmsmqpnqg |
| 181 | pmmhqqppsq qynmpqgggq hyqgqqppmg mmgqvnqgnh mmgqrqippy rppqqgppqq |
| 241 | ysgqedyygd qyshggqgpp egmnqqyypd ghndygyqqp sypeqgydrp yedssqhyye |
| 301 | ggnsqygqqq dayqgpppqq gyppqqqqyp gqqgypgqqq gygpsqggpg pqypnypqqq |
| 361 | gqqyggyrpt qpgppqppqq rpygydqgqy gnyqq |

SEQ ID NO: 38 Mouse SS18 Amino Acid Sequence isoform 1 (NP_033306.2)

| | |
|---|---|
| 1 | msvafaaprq rgkgeitpaa iqkmldennh liqcimdygn kgkasecsqy qqilhtnlvy |
| 61 | latiadsnqn mqsllpappt qtmpmgpggm sqsgpppppr shnmpsdgmv gggppaphmq |
| 121 | nqmngqmpgp nhmpmqgpgp sqlsmtnssm nmpssshgsm ggynhsvpss qsmpvqnqmt |
| 181 | msqgqpmgny gprpnmnmqp nqgpmmhqqp psqqynmppg gaqhyqgqqa pmglmgqvnq |
| 241 | gshmmgqrqm ppyrppqqgp pqqysgqedy ygdqyshggq gppegmnqqy ypdghndygy |
| 301 | qqpsypeqgy drpyedssqh yyeggnsqyg qqqdayqgpp pqqgyppqqq qypgqqgypg |
| 361 | qqqsygpsqg gpgpqypnyp qgqgqqyggy rptqpgppqp pqqrpygydq gqygnyqq |

SEQ ID NO: 39 Mouse SS18 cDNA Sequence variant 1 (NM_009280.2; CDS: 180-
1436)

| | |
|---|---|
| 1 | ccttgctggg agctgcggct cagcgttaag gccaagccgg ccagcgaggg acgcggcccg |
| 61 | ggagcatcct ccccccaccg cgcgccctaa ggtggaactg cccggaggcg ggcgtcgggc |
| 121 | ccccagctcc gcgggccctg gagcgctcgg gactcgctga tcgcgggctc ggcggcaaca |
| 181 | tgtctgtggc gttcgcagcc ccgaggcagc ggggcaaggg cgaaatcacg cccgccgcca |
| 241 | tccagaagat gctggatgaa aacaaccatc ttattcagtg tataatggac tatcagaaca |
| 301 | aagggaaggc ctcggagtgc tcgcagtatc agcagatatt gcatacaaac ctggtatacc |
| 361 | ttgctacaat agcagactct aatcaaaata tgcagtctct cttaccagca ccgcccacac |
| 421 | agactatgcc aatgggtcct ggagggatga gtcagagtgg ccctccaccc cctccccgct |
| 481 | ctcacaacat gccttcagat ggaatggtgg gtgggggccc tcctgcacca cacatgcaga |
| 541 | accagatgaa cggccagatg cctgggccta accatatgcc aatgcaggga cctggaccca |
| 601 | gtcagctcag catgacaaac agctccatga atatgccttc aagtagccat ggctccatgg |
| 661 | gaggttacaa ccattctgtg ccgtcatccc agagcatgcc cgtgcagaac cagatgacaa |
| 721 | tgagtcaggg gcagccaatg ggaaactatg gtcccagacc aaacatgaat atgcaaccaa |
| 781 | atcaagggcc gatgatgcac cagcagcctc cttctcagca gtacaatatg ccacctggag |
| 841 | gggcacagca ttaccaagga cagcaggcgc ccatggggct gatgggccaa gttaaccaag |
| 901 | gcagtcacat gatgggccag cgacagatgc ctccctacag acctccgcaa cagggcccac |
| 961 | cacagcagta ctcaggccag gaagactatt atggggacca atacagtcat ggtggacaag |
| 1021 | gtcctccaga aggcatgaac cagcaatatt accctgatgg tcataatgat tacggttatc |
| 1081 | agcaaccgtc gtatcctgaa caaggctacg ataggcctta tgaggattcc tcacaacatt |
| 1141 | actacgaagg aggaaactcc cagtatggcc aacagcaaga cgcttaccag ggaccacctc |
| 1201 | cacagcaagg atacccaccc cagcagcagc agtacccggg acagcaggga tacccagggc |
| 1261 | agcagcagag ctatggtcct tcgcagggcg gtccaggtcc tcagtatcct aattatcctc |
| 1321 | agggtcaagg tcagcagtat gggggctata gaccaacaca gccaggacca ccccagccac |
| 1381 | cccagcagag gccttatggg tacgaccagg gacagtatgg aaattaccag cagtgaaaat |
| 1441 | gtccttacat tccaatagcc agtacctatt agcaggcacg ttgtcacagc actgcaccat |
| 1501 | ggacaccccc ctgggaagac tccttccatt ccagctaggt ttttgggaaa acctttggct |
| 1561 | aagtggctgc ttcgtcagca agtagctgtt atggtttagt ttgtaaaggc ttcgtagcta |
| 1621 | ccgatgcacc tgatttcacg tttctactct agatggcaac attggacaga aaatgcattg |
| 1681 | acgtgaggag tttgcagcgg tttcagaact gtgctgcaaa tggactgtca cagcctgaaa |
| 1741 | ggtgtgagca gctgggtgtg tgttcgcgga gcttcagggg gtttcatact tttccaccga |
| 1801 | ttattttgta aggggaaggg ggaaatgtac actttttaca gcagcaatat tttgtctatt |
| 1861 | atgtttattt catgtgataa atatgcaaag cggtacacta cacactgggc agaatcagaa |
| 1921 | cccctgttaa tgtggagtgt ggtagatgct cggtgctgtg gtgctctgaa gacaggcgag |
| 1981 | gggaggcaga agcccaccac aggcccgctg ttagttctta gaggaaactc ctctctctct |
| 2041 | tatctaccag attagcaagg gcgctgtgat acagtttttt gagtacaaag acatttttta |
| 2101 | aaaagccttc cagttttgtg cattaaaacc tttttgtaaa tatggtttat aatactgttt |
| 2161 | tcaaacgcaa ggcaataatt atgttgcatc tgtgaacttt ggcaggtttg tgtaaaagga |
| 2221 | gggaagcctc tcttaaaaca gcaataacag aaaaggagga agcgggatgt ttttaccttg |
| 2281 | tcttgtaatc agggagctct caccacgtca gagaggaggc agcattggtc tcaccttact |
| 2341 | gttttttaca ttaccatgat tggttcatgg agcagggagg agtccacgag acttcacacg |
| 2401 | cttgtgcttt aactttctta actgggcaca agcaaagggc gccttcgtgt tcctctcttc |
| 2461 | atcttagtta atgcgcgagg aaaatgcttt gatggccatt tctcattcgc actgaaagcc |
| 2521 | gagaggtgac attttacggt ttcttgtttt taagcacgac atacttaatc attatttgag |
| 2581 | actgattatt ttagctaaat ttggggatat gccatggggc aagaaaacat gtactgagag |
| 2641 | atttctaaac acatctattt aagcatactt taaaaatatc tagcccaaag gtaagttgct |
| 2701 | gtatcctcac agttgtctgc atccagggaa tatgactgaa tataacatat ctttgtaatt |
| 2761 | gaattagttt ttgccacttc taactgaaaa cagaacagaa ggagtgccat aaatgcaaag |
| 2821 | aagcaaagtg tactgttgtc aacatactgt aatcagagga ggggtttcaa tgtgtctgga |
| 2881 | tgagagtgtg tgtgtttaag gtcagagtat agggtgttct tcaacttgga cagtagaaaa |
| 2941 | taggcatcaa gtgtgaaccg gtgaggcgtg gacagccttc ttgtgactga gatgcttgta |
| 3001 | agttctgtgc caggttctcc accactgtgt actttattgc tatttaaaac tgtatcaact |
| 3061 | ctaacgaaag aataaattat ttgtgatttt aaaaaaaaaa aaaaaaaaaa |

SEQ ID NO: 40 Mouse SS18 Amino Acid Sequence isoform 2 (NP_001154841.1)

| | |
|---|---|
| 1 | msvafaaprq rgkgeitpaa iqkmldennh liqcimdyqn kgkasecsqy qqilhtnlvy |
| 61 | latiadsnqn mqsllpappt qtmpmgpggm sqsgpppppr shnmpsdgmv gggppaphmq |
| 121 | nqmngqmpgp nhmpmqgpgp sqlsmtnssm nmpssshgsm ggynhsvpss qsmpvqnqmt |
| 181 | msqgqpmgny gprpnmnmqp nqgpmmhqqp psqqynmppg gaqhyqgqqa pmglmgqvnq |
| 241 | gshmmgqrqm ppyrppqqgp pqqysgqedy ygdqyshggq gppegmnqqy ypdgnsqygq |
| 301 | qqdayqgppp qqgyppqqqq ypgqqgypgq qqsygpsqgg pgpqypnypq gqgqqyggyr |
| 361 | ptqpgppqpp qqrpygydqg qygnyqq |

SEQ ID NO: 41 Mouse SS18 cDNA Sequence variant 2 (NM_001161369.1; CDS:
180-1343)

| | |
|---|---|
| 1 | ccttgctggg agctgcggct cagcgttaag gccaagccgg ccagcgaggg acgcggcccg |
| 61 | ggagcatcct ccccccaccg cgcgccctaa ggtggaactg cccggaggcg ggcgtcgggc |
| 121 | ccccagctcc gcgggccctg gagcgctcgg gactcgctga tcgcgggctc ggcggcaaca |
| 181 | tgtctgtggc gttcgcagcc ccgaggcagc ggggcaaggg cgaaatcacg cccgccgcca |
| 241 | tccagaagat gctggatgaa aacaaccatc ttattcagtg tataatggac tatcagaaca |
| 301 | aagggaaggc ctcggagtgc tcgcagtatc agcagatatt gcatacaaac ctggtatacc |
| 361 | ttgctacaat agcagactct aatcaaaata tgcagtctct cttaccagca ccgcccacac |
| 421 | agactatgcc aatgggtcct ggagggatga gtcagagtgg ccctccaccc cctccccgct |
| 481 | ctcacaacat gccttcagat ggaatggtgg gtgggggccc tcctgcacca cacatgcaga |
| 541 | accagatgaa cggccagatg cctgggccta accatatgcc aatgcaggga cctggaccca |
| 601 | gtcagctcag catgacaaac agctccatga atatgccttc aagtagccat ggctccatgg |
| 661 | gaggttacaa ccattctgtg ccgtcatccc agagcatgcc cgtgcagaac cagatgacaa |
| 721 | tgagtcaggg gcagccaatg ggaaactatg gtcccagacc aaacatgaat atgcaaccaa |
| 781 | atcaagggcc gatgatgcac cagcagcctc cttctcagca gtacaatatg ccacctggag |
| 841 | gggcacagca ttaccaagga cagcaggcgc ccatggggct gatgggccaa gttaaccaag |
| 901 | gcagtcacat gatgggccag cgacagatgc ctccctacag acctccgcaa cagggcccac |
| 961 | cacagcagta ctcaggccag gaagactatt atggggacca atacagtcat ggtggacaag |
| 1021 | gtcctccaga aggcatgaac cagcaatatt accctgatgg aaactcccag tatggccaac |
| 1081 | agcaagacgc ttaccaggga ccacctccac agcaaggata cccaccccag cagcagcagt |
| 1141 | acccgggaca gcagggatac ccagggcagc agcagagcta tggtccttcg cagggcggtc |
| 1201 | caggtcctca gtatcctaat tatcctcagg gtcaaggtca gcagtatggg ggctatagac |
| 1261 | caacacagcc aggaccaccc cagccacccc agcagaggcc ttatgggtac gaccagggac |
| 1321 | agtatggaaa ttaccagcag tgaaaatgtc cttacattcc aatagccagt acctattagc |
| 1381 | aggcacgttg tcacagcact gcaccatgga cacccccctg ggaagactcc ttccattcca |
| 1441 | gctaggtttt tgggaaaacc tttggctaag tggctgcttc gtcagcaagt agctgttatg |
| 1501 | gtttagtttg taaaggcttc gtagctaccg atgcacctga tttcacgttt ctactctaga |
| 1561 | tggcaacatt ggacagaaaa tgcattgacg tgaggagttt gcagcggttt cagaactgtg |
| 1621 | ctgcaaatgg actgtcacag cctgaaaggt gtgagcagct gggtgtgtgt tcgcggagct |
| 1681 | tcagggggtt tcatactttt ccaccgatta ttttgtaagg ggaaggggga aatgtacact |
| 1741 | ttttacagca gcaatatttt gtctattatg tttatttcat gtgataaata tgcaaagcgg |
| 1801 | tacactacac actgggcaga atcagaaccc ctgttaatgt ggagtgtggt agatgctcgg |
| 1861 | tgctgtggtg ctctgaagac aggcgagggg aggcagaagc ccaccacagg cccgctgtta |
| 1921 | gttcttagag gaaactcctc tctctcttat ctaccagatt agcaagggcg ctgtgataca |
| 1981 | gttttttgag tacaaagaca ttttttaaaa agccttccag ttttgtgcat taaaaccttt |
| 2041 | ttgtaaatat ggtttataat actgttttca aacgcaaggc aataattatg ttgcatctgt |
| 2101 | gaactttggc aggtttgtgt aaaaggaggg aagcctctct taaaacagca ataacagaaa |
| 2161 | aggaggaagc gggatgtttt taccttgtct tgtaatcagg gagctctcac cacgtcagag |
| 2221 | aggaggcagc attggtctca ccttactgtt ttttacatta ccatgattgg ttcatggagc |
| 2281 | agggaggagt ccacgagact tcacacgctt gtgctttaac tttcttaact gggcacaagc |
| 2341 | aaagggcgcc ttcgtgttcc tctcttcatc ttagttaatg cgcgaggaaa atgctttgat |
| 2401 | ggccatttct cattcgcact gaaagccgag aggtgacatt ttacggtttc ttgtttttaa |
| 2461 | gcacgacata cttaatcatt atttgagact gattatttta gctaaatttg gggatatgcc |
| 2521 | atggggcaag aaaacatgta ctgagagatt tctaaacaca tctatttaag catactttaa |
| 2581 | aaatatctag cccaaaggta agttgctgta tcctcacagt tgtctgcatc cagggaatat |
| 2641 | gactgaatat aacatatctt tgtaattgaa ttagtttttg ccacttctaa ctgaaaacag |
| 2701 | aacagaagga gtgccataaa tgcaaagaag caaagtgtac tgttgtcaac atactgtaat |
| 2761 | cagaggaggg gtttcaatgt gtctggatga gagtgtgtgt gtttaaggtc agagtatagg |
| 2821 | gtgttcttca acttggacag tagaaaatag gcatcaagtg tgaaccggtg aggcgtggac |
| 2881 | agccttcttg tgactgagat gcttgtaagt tctgtgccag gttctccacc actgtgtact |
| 2941 | ttattgctat ttaaaactgt atcaactcta acgaaagaat aaattatttg tgattttaaa |
| 3001 | aaaaaaaaaa aaaaaaa |

SEQ ID NO: 42 Mouse SS18 Amino Acid Sequence isoform 3 (NP_001154842.1)

| | |
|---|---|
| 1 | msvafaaprq rgkgeitpaa iqkmldennh liqcimdyqn kgkasecsqy qqilhtnlvy |
| 61 | latiadsnqn mqsllpappt qtmpmgpggm sqsgpppppr shnmpsdgmv gggppaphmq |
| 121 | nqmngqmpgp mmhqqppsqq ynmppggaqh yqgqqapmgl mgqvnqgshm mgqrqmppyr |
| 181 | ppqqgppqqy sgqedyygdq yshggqgppe gmnqqyypdg hndygyqqps ypeqgydrpy |
| 241 | edssqhyyeg gnsqygqqqd ayqgpppqqg yppqqqqypg qqgypgqqqs ygpsqggpgp |
| 301 | qypnypqgqg qqyggyrptq pgppqppqqr pygydqgqyg nyqq |

SEQ ID NO: 43 Mouse SS18 cDNA Sequence variant 3 (NM_001161370.1; CDS:
180-1214)

| | |
|---|---|
| 1 | ccttgctggg agctgcggct cagcgttaag gccaagccgg ccagcgaggg acgcggcccg |
| 61 | ggagcatcct ccccccaccg cgcgccctaa ggtggaactg cccggaggcg ggcgtcgggc |
| 121 | ccccagctcc gcgggccctg gagcgctcgg gactcgctga tcgcgggctc ggcggcaaca |
| 181 | tgtctgtggc gttcgcagcc ccgaggcagc ggggcaaggg cgaaatcacg cccgccgcca |
| 241 | tccagaagat gctggatgaa aacaaccatc ttattcagtg tataatggac tatcagaaca |
| 301 | aagggaaggc ctcggagtgc tcgcagtatc agcagatatt gcatacaaac ctggtatacc |
| 361 | ttgctacaat agcagactct aatcaaaata tgcagtctct cttaccagca ccgcccacac |
| 421 | agactatgcc aatgggtcct ggagggatga gtcagagtgg ccctccaccc cctccccgct |
| 481 | ctcacaacat gccttcagat ggaatggtgg gtgggggccc tcctgcacca cacatgcaga |
| 541 | accagatgaa cggccagatg cctgggccga tgatgcacca gcagcctcct tctcagcagt |
| 601 | acaatatgcc acctggaggg gcacagcatt accaaggaca gcaggcgccc atggggctga |
| 661 | tgggccaagt taaccaaggc agtcacatga tgggccagcg acagatgcct ccctacagac |
| 721 | ctccgcaaca gggcccacca cagcagtact caggccagga agactattat ggggaccaat |
| 781 | acagtcatgg tggacaaggt cctccagaag gcatgaacca gcaatattac cctgatggtc |
| 841 | ataatgatta cggttatcag caaccgtcgt atcctgaaca aggctacgat aggccttatg |
| 901 | aggattcctc acaacattac tacgaaggag gaaactccca gtatggccaa cagcaagacg |
| 961 | cttaccaggg accacctcca cagcaaggat acccacccca gcagcagcag tacccgggac |
| 1021 | agcagggata cccagggcag cagcagagct atggtccttc gcagggcggt ccaggtcctc |
| 1081 | agtatcctaa ttatcctcag ggtcaaggtc agcagtatgg gggctataga ccaacacagc |
| 1141 | caggaccacc ccagccaccc cagcagaggc cttatgggta cgaccaggga cagtatggaa |
| 1201 | attaccagca gtgaaaatgt ccttacattc caatagccag tacctattag caggcacgtt |
| 1261 | gtcacagcac tgcaccatgg acacccccct gggaagactc cttccattcc agctaggttt |
| 1321 | ttgggaaaac ctttggctaa gtggctgctt cgtcagcaag tagctgttat ggtttagttt |
| 1381 | gtaaaggctt cgtagctacc gatgcacctg atttcacgtt tctactctag atggcaacat |
| 1441 | tggacagaaa atgcattgac gtgaggagtt tgcagcggtt tcagaactgt gctgcaaatg |
| 1501 | gactgtcaca gcctgaaagg tgtgagcagc tgggtgtgtg ttcgcggagc ttcagggggt |
| 1561 | ttcatacttt tccaccgatt attttgtaag gggaaggggg aaatgtacac tttttacagc |
| 1621 | agcaatattt tgtctattat gtttatttca tgtgataaat atgcaaagcg gtacactaca |
| 1681 | cactgggcag aatcagaacc cctgttaatg tggagtgtgg tagatgctcg gtgctgtggt |
| 1741 | gctctgaaga caggcgaggg gaggcagaag cccaccacag gcccgctgtt agttcttaga |
| 1801 | ggaaactcct ctctctctta tctaccagat tagcaagggc gctgtgatac agttttttga |
| 1861 | gtacaaagac attttttaaa aagccttcca gttttgtgca ttaaaacctt tttgtaaata |
| 1921 | tggtttataa tactgttttc aaacgcaagg caataattat gttgcatctg tgaactttgg |
| 1981 | caggtttgtg taaaaggagg gaagcctctc ttaaaacagc aataacagaa aaggaggaag |
| 2041 | cgggatgttt ttaccttgtc ttgtaatcag ggagctctca ccacgtcaga gaggaggcag |
| 2101 | cattggtctc accttactgt tttttacatt accatgattg gttcatggag cagggaggag |
| 2161 | tccacgagac ttcacacgct tgtgctttaa ctttcttaac tgggcacaag caaagggcgc |
| 2221 | cttcgtgttc ctctcttcat cttagttaat gcgcgaggaa aatgctttga tggccatttc |
| 2281 | tcattcgcac tgaaagccga gaggtgacat tttacggttt cttgttttta agcacgacat |
| 2341 | acttaatcat tatttgagac tgattatttt agctaaattt ggggatatgc catggggcaa |
| 2401 | gaaaacatgt actgagagat ttctaaacac atctatttaa gcatacttta aaaatatcta |
| 2461 | gcccaaaggt aagttgctgt atcctcacag ttgtctgcat ccagggaata tgactgaata |
| 2521 | taacatatct ttgtaattga attagttttt gccacttcta actgaaaaca gaacagaagg |
| 2581 | agtgccataa atgcaaagaa gcaaagtgta ctgttgtcaa catactgtaa tcagaggagg |
| 2641 | ggtttcaatg tgtctggatg agagtgtgtg tgtttaaggt cagagtatag ggtgttcttc |
| 2701 | aacttggaca gtagaaaata ggcatcaagt gtgaaccggt gaggcgtgga cagccttctt |
| 2761 | gtgactgaga tgcttgtaag ttctgtgcca ggttctccac cactgtgtac tttattgcta |
| 2821 | tttaaaactg tatcaactct aacgaaagaa taaattattt gtgattttaa aaaaaaaaaa |
| 2881 | aaaaaaaa |

SEQ ID NO: 44 Mouse SS18 Amino Acid Sequence isoform 4 (NP_001154843.1)

| | |
|---|---|
| 1 | msvafaaprq rgkgeitpaa iqkmldennh liqcimdygn kgkasecsqy qqilhtnlvy |
| 61 | latiadsnqn mqsllpappt qtmpmgpggm sqsgpppppr shnmpsdgmv gggppaphmq |
| 121 | nqmngqmpgp mmhqqppsqq ynmppggagh yqgqqapmgl mgqvnqgshm mgqrqmppyr |
| 181 | ppqqgppqqy sgqedyygdq yshggqgppe gmnqqyypdg nsqygqqqda yqgpppqqgy |
| 241 | ppqqqqypgq qgypgqqqsy gpsqggpgpq ypnypqgqgq qyggyrptqp gppqppqqrp |
| 301 | ygydqgqygn yqq |

SEQ ID NO: 45 Mouse SS18 cDNA Sequence variant 4 (NM_001161371.1; CDS:
180-1121)

| | |
|---|---|
| 1 | ccttgctggg agctgcggct cagcgttaag gccaagccgg ccagcgaggg acgcggcccg |
| 61 | ggagcatcct ccccccaccg cgcgccctaa ggtggaactg cccggaggcg ggcgtcgggc |
| 121 | ccccagctcc gcgggccctg gagcgctcgg gactcgctga tcgcgggctc ggcggcaaca |
| 181 | tgtctgtggc gttcgcagcc ccgaggcagc ggggcaaggg cgaaatcacg cccgccgcca |
| 241 | tccagaagat gctggatgaa aacaaccatc ttattcagtg tataatggac tatcagaaca |
| 301 | aagggaaggc ctcggagtgc tcgcagtatc agcagatatt gcatacaaac ctggtatacc |
| 361 | ttgctacaat agcagactct aatcaaaata tgcagtctct cttaccagca ccgcccacac |
| 421 | agactatgcc aatgggtcct ggagggatga gtcagagtgg ccctccaccc cctccccgct |
| 481 | ctcacaacat gccttcagat ggaatggtgg gtgggggccc tcctgcacca cacatgcaga |
| 541 | accagatgaa cggccagatg cctgggccga tgatgcacca gcagcctcct tctcagcagt |
| 601 | acaatatgcc acctggaggg gcacagcatt accaaggaca gcaggcgccc atggggctga |
| 661 | tgggccaagt taaccaaggc agtcacatga tgggccagcg acagatgcct ccctacagac |
| 721 | ctccgcaaca gggcccacca cagcagtact caggccagga agactattat ggggaccaat |
| 781 | acagtcatgg tggacaaggt cctccagaag gcatgaacca gcaatattac cctgatggaa |
| 841 | actcccagta tggccaacag caagacgctt accagggacc acctccacag caaggatacc |
| 901 | caccccagca gcagcagtac ccgggacagc agggataccc agggcagcag cagagctatg |
| 961 | gtccttcgca gggcggtcca ggtcctcagt atcctaatta tcctcagggt caaggtcagc |
| 1021 | agtatggggg ctatagacca acacagccag gaccacccca gccaccccag cagaggcctt |
| 1081 | atgggtacga ccagggacag tatggaaatt accagcagtg aaaatgtcct tacattccaa |
| 1141 | tagccagtac ctattagcag gcacgttgtc acagcactgc accatggaca cccccctggg |
| 1201 | aagactcctt ccattccagc taggtttttg ggaaaacctt tggctaagtg gctgcttcgt |
| 1261 | cagcaagtag ctgttatggt ttagtttgta aaggcttcgt agctaccgat gcacctgatt |
| 1321 | tcacgtttct actctagatg gcaacattgg acagaaaatg cattgacgtg aggagtttgc |
| 1381 | agcggtttca gaactgtgct gcaaatggac tgtcacagcc tgaaaggtgt gagcagctgg |
| 1441 | gtgtgtgttc gcggagcttc agggggtttc atacttttcc accgattatt ttgtaagggg |
| 1501 | aagggggaaa tgtacacttt ttacagcagc aatattttgt ctattatgtt tatttcatgt |
| 1561 | gataaatatg caaagcggta cactacacac tgggcagaat cagaacccct gttaatgtgg |
| 1621 | agtgtggtag atgctcggtg ctgtggtgct ctgaagacag gcgaggggag gcagaagccc |
| 1681 | accacaggcc cgctgttagt tcttagagga aactcctctc tctcttatct accagattag |
| 1741 | caagggcgct gtgatacagt tttttgagta caaagacatt ttttaaaaag ccttccagtt |
| 1801 | ttgtgcatta aaaccttttt gtaaatatgg tttataatac tgttttcaaa cgcaaggcaa |
| 1861 | taattatgtt gcatctgtga actttggcag gtttgtgtaa aaggagggaa gcctctctta |
| 1921 | aaacagcaat aacagaaaag gaggaagcgg gatgttttta ccttgtcttg taatcaggga |
| 1981 | gctctcacca cgtcagagag gaggcagcat tggtctcacc ttactgtttt ttacattacc |
| 2041 | atgattggtt catggagcag ggaggagtcc acgagacttc acacgcttgt gctttaactt |
| 2101 | tcttaactgg gcacaagcaa agggcgcctt cgtgttcctc tcttcatctt agttaatgcg |
| 2161 | cgaggaaaat gctttgatgg ccatttctca ttcgcactga aagccgagag gtgacatttt |
| 2221 | acggtttctt gtttttaagc acgacatact taatcattat ttgagactga ttattttagc |
| 2281 | taaatttggg gatatgccat ggggcaagaa aacatgtact gagagatttc taaacacatc |
| 2341 | tatttaagca tactttaaaa atatctagcc caaaggtaag ttgctgtatc ctcacagttg |
| 2401 | tctgcatcca gggaatatga ctgaatataa catatctttg taattgaatt agtttttgcc |
| 2461 | acttctaact gaaaacagaa cagaaggagt gccataaatg caaagaagca aagtgtactg |
| 2521 | ttgtcaacat actgtaatca gaggaggggt ttcaatgtgt ctggatgaga gtgtgtgtgt |
| 2581 | ttaaggtcag agtatagggt gttcttcaac ttggacagta gaaaataggc atcaagtgtg |
| 2641 | aaccggtgag gcgtggacag ccttcttgtg actgagatgc ttgtaagttc tgtgccaggt |
| 2701 | tctccaccac tgtgtacttt attgctattt aaaactgtat caactctaac gaaagaataa |
| 2761 | attatttgtg attttaaaaa aaaaaaaaaa aaaaa |

SEQ ID NO: 46 Human ARID1A cDNA Sequence Variant 1 (NM_006015.4, CDS:
from 374 to 7231)

| | |
|---|---|
| 1 | cagaaagcgg agagtcacag cggggccagg ccctggggag cggagcctcc accgcccccc |
| 61 | tcattcccag gcaagggctt ggggggaatg agccgggaga gccgggtccc gagcctacag |
| 121 | agccgggagc agctgagccg ccggcgcctc ggccgccgcc gccgcctcct cctcctccgc |
| 181 | cgccgccagc ccggagcctg agccggcggg gcggggggga gaggagcgag cgcagcgcag |
| 241 | cagcggagcc ccgcgaggcc cgcccgggcg ggtggggagg gcagcccggg ggactgggcc |
| 301 | ccggggcggg gtgggagggg gggagaagac gaagacaggg ccgggtctct ccgcggacga |
| 361 | gacagcgggg atcatggccg cgcaggtcgc ccccgccgcc gccagcagcc tgggcaaccc |
| 421 | gccgccgccg ccgccctcgg agctgaagaa agccgagcag cagcagcggg aggaggcggg |
| 481 | gggcgaggcg gcggcggcgg cagcggccga gcgcggggaa atgaaggcag ccgccgggca |
| 541 | ggaaagcgag ggccccgccg tggggccgcc gcagccgctg ggaaaggagc tgcaggacgg |
| 601 | ggccgagagc aatgggggtg gcggcggcgg cggagccggc agcggcggcg ggcccggcgc |
| 661 | ggagccggac ctgaagaact cgaacgggaa cgcgggccct aggcccgccc tgaacaataa |
| 721 | cctcacggag ccgcccggcg gcggcggtgg cggcagcagc gatggggtgg gggcgcctcc |
| 781 | tcactcagcc gcggccgcct tgccgccccc agcctacggc ttcgggcaac cctacggccg |
| 841 | gagcccgtct gccgtcgccg ccgccgcggc cgccgtcttc caccaacaac atggcggaca |
| 901 | acaaagccct ggcctggcag cgctgcagag cggcggcggc gggggcctgg agccctacgc |
| 961 | ggggccccag cagaactctc acgaccacgg cttccccaac caccagtaca actcctacta |
| 1021 | ccccaaccgc agcgcctacc ccccgcccgc cccggcctac gcgctgagct ccccgagagg |
| 1081 | tggcactccg ggctccggcg cggcggcggc tgccggctcc aagccgcctc cctcctccag |
| 1141 | cgcctccgcc tcctcgtcgt cttcgtcctt cgctcagcag cgcttcgggg ccatgggggg |
| 1201 | aggcggcccc tccgcggccg gcgggggaac tccccagccc accgccaccc ccaccctcaa |
| 1261 | ccaactgctc acgtcgccca gctcggcccg gggctaccag ggctaccccg ggggcgacta |
| 1321 | cagtggcggg ccccaggacg ggggcgccgg caagggcccg gcggacatgg cctcgcagtg |
| 1381 | ttggggggct gcggcggcgg cagctgcggc ggcggccgcc tcgggagggg cccaacaaag |
| 1441 | gagccaccac gcgcccatga gccccgggag cagcggcggc ggggggcagc cgctcgcccg |
| 1501 | gacccctcag ccatccagtc caatggatca gatgggcaag atgagacctc agccatatgg |
| 1561 | cgggactaac ccatactcgc agcaacaggg acctccgtca ggaccgcagc aaggacatgg |
| 1621 | gtacccaggg cagccatacg ggtcccagac cccgcagcgg tacccgatga ccatgcaggg |
| 1681 | ccgggcgcag agtgccatgg gcggcctctc ttatacacag cagattcctc cttatggaca |
| 1741 | acaaggcccc agcgggtatg gtcaacaggg ccagactcca tattacaacc agcaaagtcc |
| 1801 | tcaccctcag cagcagcagc caccctactc ccagcaacca ccgtcccaga cccctcatgc |
| 1861 | ccaaccttcg tatcagcagc agccacagtc tcaaccacca cagctccagt cctctcagcc |
| 1921 | tccatactcc cagcagccat cccagcctcc acatcagcag tccccggctc catacccctc |
| 1981 | ccagcagtcg acgacacagc agcaccccca gagccagccc ccctactcac agccacaggc |
| 2041 | tcagtctcct taccagcagc agcaacctca gcagccagca ccctcgacgc tctcccagca |
| 2101 | ggctgcgtat cctcagcccc agtctcagca gtcccagcaa actgcctatt cccagcagcg |
| 2161 | cttccctcca ccgcaggagc tatctcaaga ttcatttggg tctcaggcat cctcagcccc |
| 2221 | ctcaatgacc tccagtaagg gagggcaaga agatatgaac ctgagccttc agtcaagacc |
| 2281 | ctccagcttg cctgatctat ctggttcaat agatgacctc cccatgggga cagaaggagc |
| 2341 | tctgagtcct ggagtgagca catcagggat ttccagcagc caaggagagc agagtaatcc |
| 2401 | agctcagtct cctttctctc ctcatacctc ccctcacctg cctggcatcc gaggcccttc |
| 2461 | cccgtcccct gttggctctc ccgccagtgt tgctcagtct cgctcaggac cactctcgcc |
| 2521 | tgctgcagtg ccaggcaacc agatgccacc tcggccaccc agtggccagt cggacagcat |
| 2581 | catgcatcct tccatgaacc aatcaagcat tgcccaagat cgaggttata tgcagaggaa |
| 2641 | cccccagatg ccccagtaca gttcccccca gcccggctca gccttatctc cgcgtcagcc |
| 2701 | ttccggagga cagatacaca caggcatggg ctcctaccag cagaactcca tggggagcta |
| 2761 | tggtccccag gggggtcagt atggcccaca aggtggctac cccaggcagc caaactataa |
| 2821 | tgccttgccc aatgccaact accccagtgc aggcatggct ggaggcataa accccatggg |
| 2881 | tgccggaggt caaatgcatg gacagcctgg catcccacct tatggcacac tccctccagg |
| 2941 | gaggatgagt cacgcctcca tgggcaaccg gccttatggc cctaacatgg ccaatatgcc |
| 3001 | acctcaggtt gggtcaggga tgtgtccccc accagggggc atgaaccgga aaacccaaga |
| 3061 | aactgctgtc gccatgcatg ttgctgccaa ctctatccaa aacaggccgc caggctaccc |
| 3121 | caatatgaat caagggggca tgatgggaac tggacctcct tatggacaag ggattaatag |
| 3181 | tatggctggc atgatcaacc ctcagggacc cccatattcc atgggtggaa ccatggccaa |
| 3241 | caattctgca gggatggcag ccagcccaga gatgatgggc cttggggatg taaagttaac |
| 3301 | tccagccacc aaaatgaaca acaaggcaga tgggacaccc aagacagaat ccaaatccaa |
| 3361 | gaaatccagt tcttctacta caaccaatga gaagatcacc aagttgtatg agctgggtgg |
| 3421 | tgagcctgag aggaagatgt gggtggaccg ttatctggcc ttcactgagg agaaggccat |
| 3481 | gggcatgaca aatctgcctg ctgtgggtag gaaacctctg gacctctatc gcctctatgt |
| 3541 | gtctgtgaag gagattggtg gattgactca ggtcaacaag aacaaaaaat ggcgggaact |
| 3601 | tgcaaccaac ctcaatgtgg gcacatcaag cagtgctgcc agctccttga aaaagcagta |
| 3661 | tatccagtgt ctctatgcct ttgaatgcaa gattgaacgg ggagaagacc ctcccccaga |
| 3721 | catctttgca gctgctgatt ccaagaagtc ccagcccaag atccagcctc cctctcctgc |
| 3781 | gggatcagga tctatgcagg ggccccagac tccccagtca accagcagtt ccatggcaga |
| 3841 | aggaggagac ttaaagccac caactccagc atccacacca cacagtcaga tccccccatt |
| 3901 | gccaggcatg agcaggagca attcagttgg gatccaggat gcctttaatg atggaagtga |
| 3961 | ctccacattc cagaagcgga attccatgac tccaaaccct gggtatcagc ccagtatgaa |
| 4021 | tacctctgac atgatggggc gcatgtccta tgagccaaat aaggatcctt atggcagcat |
| 4081 | gaggaaagct ccagggagtg atcccttcat gtcctcaggg cagggcccca acggcgggat |
| 4141 | gggtgacccc tacagtcgtg ctgccggccc tgggctagga aatgtggcga tgggaccacg |
| 4201 | acagcactat ccctatggag gtccttatga cagagtgagg acggagcctg gaatagggcc |
| 4261 | tgagggaaac atgagcactg gggccccaca gccgaatctc atgccttcca acccagactc |
| 4321 | ggggatgtat tctcctagcc gctacccccc gcagcagcag cagcagcagc agcaacgaca |
| 4381 | tgattcctat ggcaatcagt tctccaccca aggcacccct tctggcagcc ccttccccag |
| 4441 | ccagcagact acaatgtatc aacagcaaca gcagaattac aagcggccaa tggatggcac |
| 4501 | atatggccct cctgccaagc ggcacgaagg ggagatgtac agcgtgccat acagcactgg |
| 4561 | gcaggggcag cctcagcagc agcagttgcc cccagcccag ccccagcctg ccagccagca |
| 4621 | acaagctgcc cagccttccc ctcagcaaga tgtatacaac cagtatggca atgcctatcc |
| 4681 | tgccactgcc acagctgcta ctgagcgccg accagcaggc ggcccccaga accaatttcc |
| 4741 | attccagttt ggccgagacc gtgtctctgc accccctggc accaatgccc agcaaaacat |
| 4801 | gccaccacaa atgatgggcg gccccataca ggcatcagct gaggttgctc agcaaggcac |
| 4861 | catgtggcag gggcgtaatg acatgaccta taattatgcc aacaggcaga gcacgggctc |
| 4921 | tgccccccag ggccccgcct atcatggcgt gaaccgaaca gatgaaatgc tgcacacaga |
| 4981 | tcagagggcc aaccacgaag gctcgtggcc ttcccatggc acacgccagc ccccatatgg |
| 5041 | tccctctgcc cctgtgcccc ccatgacaag gccccctcca tctaactacc agcccccacc |
| 5101 | aagcatgcag aatcacattc ctcaggtatc cagccctgct cccctgcccc ggccaatgga |
| 5161 | gaaccgcacc tctcctagca agtctccatt cctgcactct gggatgaaaa tgcagaaggc |
| 5221 | aggtccccca gtacctgcct cgcacatagc acctgcccct gtgcagcccc ccatgattcg |
| 5281 | gcgggatatc accttcccac ctggctctgt tgaagccaca cagcctgtgt tgaagcagag |
| 5341 | gaggcggctc acaatgaaag acattggaac cccggaggca tggcgggtaa tgatgtccct |
| 5401 | caagtctggt ctcctggcag agagcacatg ggcattagat accatcaaca tcctgctgta |
| 5461 | tgatgacaac agcatcatga ccttcaacct cagtcagctc ccagggttgc tagagctcct |
| 5521 | tgtagaatat ttccgacgat gcctgattga gatctttggc attttaaagg agtatgaggt |
| 5581 | gggtgaccca ggacagagaa cgctactgga tcctgggagg ttcagcaagg tgtctagtcc |
| 5641 | agctcccatg gagggtgggg aagaagaaga agaacttcta ggtcctaaac tagaagagga |
| 5701 | agaagaagag gaagtagttg aaaatgatga ggagatagcc ttttcaggca aggacaagcc |
| 5761 | agcttcagag aatagtgagg agaagctgat cagtaagttt gacaagcttc cagtaaagat |
| 5821 | cgtacagaag aatgatccat ttgtggtgga ctgctcagat aagcttgggc gtgtgcagga |
| 5881 | gtttgacagt ggcctgctgc actggcggat tggtgggggg gacaccactg agcatatcca |
| 5941 | gacccacttc gagagcaaga cagagctgct gccttcccgg cctcacgcac cctgcccacc |
| 6001 | agcccctcgg aagcatgtga caacagcaga gggtacacca gggacaacag accaggaggg |
| 6061 | gcccccacct gatggacctc cagaaaaacg gatcacagcc actatggatg acatgttgtc |
| 6121 | tactcggtct agcaccttga ccgaggatgg agctaagagt tcagaggcca tcaaggagag |
| 6181 | cagcaagttt ccatttggca ttagcccagc acagagccac cggaacatca agatcctaga |
| 6241 | ggacgaaccc cacagtaagg atgagacccc actgtgtacc cttctggact ggcaggattc |
| 6301 | tcttgccaag cgctgcgtct gtgtgtccaa taccattcga agcctgtcat ttgtgccagg |
| 6361 | caatgacttt gagatgtcca aacacccagg gctgctgctc atcctgggca agctgatcct |
| 6421 | gctgcaccac aagcacccag aacggaagca ggcaccacta acttatgaaa aggaggagga |
| 6481 | acaggaccaa ggggtgagct gcaacaaagt ggagtggtgg tgggactgct tggagatgct |
| 6541 | ccgggaaaac accttggtta cactcgccaa catctcgggg cagttggacc tatctccata |
| 6601 | ccccgagagc atttgcctgc ctgtcctgga cggactccta cactgggcag tttgcccttc |
| 6661 | agctgaagcc caggacccct tttccaccct gggccccaat gccgtccttt ccccgcagag |
| 6721 | actggtcttg gaaaccctca gcaaactcag catccaggac aacaatgtgg acctgattct |
| 6781 | ggccacaccc cccttcagcc gcctggagaa gttgtatagc actatggtgc gcttcctcag |
| 6841 | tgaccgaaag aacccggtgt gccgggagat ggctgtggta ctgctggcca acctggctca |
| 6901 | gggggacagc ctggcagctc gtgccattgc agtgcagaag ggcagtatcg gcaacctcct |
| 6961 | gggcttccta gaggacagcc ttgccgccac acagttccag cagagccagg ccagcctcct |
| 7021 | ccacatgcag aacccaccct ttgagccaac tagtgtggac atgatgcggc gggctgcccg |
| 7081 | cgcgctgctt gccttggcca aggtggacga gaaccactca gagtttactc tgtacgaatc |
| 7141 | acggctgttg gacatctcgg tatcaccgtt gatgaactca ttggtttcac aagtcatttg |
| 7201 | tgatgtactg tttttgattg gccagtcatg acagccgtgg gacacctccc ccccccgtgt |
| 7261 | gtgtgtgcgt gtgtggagaa cttagaaact gactgttgcc ctttatttat gcaaaaccac |
| 7321 | ctcagaatcc agtttaccct gtgctgtcca gcttctccct tgggaaaaag tctctcctgt |
| 7381 | ttctctctcc tccttccacc tcccctccct ccatcacctc acgcctttct gttccttgtc |
| 7441 | ctcaccttac tcccctcagg accctacccc accctctttg aaaagacaaa gctctgccta |
| 7501 | catagaagac tttttttatt ttaaccaaag ttactgttgt ttacagtgag tttggggaaa |
| 7561 | aaaaataaaa taaaaatggc tttcccagtc cttgcatcaa cgggatgcca catttcataa |
| 7621 | ctgtttttaa tggtaaaaaa aaaaaaaaaa aatacaaaaa aaaattctga aggacaaaaa |
| 7681 | aggtgactgc tgaactgtgt gtggtttatt gttgtacatt cacaatcttg caggagccaa |
| 7741 | gaagttcgca gttgtgaaca gaccctgttc actggagagg cctgtgcagt agagtgtaga |
| 7801 | ccctttcatg tactgtactg tacacctgat actgtaaaca tactgtaata ataatgtctc |
| 7861 | acatggaaac agaaaacgct gggtcagcag caagctgtag tttttaaaaa tgtttttagt |
| 7921 | taaacgttga ggagaaaaaa aaaaaaggct tttcccccaa agtatcatgt gtgaacctac |
| 7981 | aacaccctga cctctttctc tcctccttga ttgtatgaat aaccctgaga tcacctctta |
| 8041 | gaactggttt taacctttag ctgcagcggc tacgctgcca cgtgtgtata tatatgacgt |
| 8101 | tgtacattgc acataccctt ggatccccac agtttggtcc tcctcccagc taccccttta |
| 8161 | tagtatgacg agttaacaag ttggtgacct gcacaaagcg agacacagct atttaatctc |
| 8221 | ttgccagata tcgcccctct tggtgcgatg ctgtacaggt ctctgtaaaa agtccttgct |
| 8281 | gtctcagcag ccaatcaact tatagtttat ttttttctgg gtttttgttt tgttttgttt |
| 8341 | tctttctaat cgaggtgtga aaaagttcta ggttcagttg aagttctgat gaagaaacac |
| 8401 | aattgagatt ttttcagtga taaaatctgc atatttgtat ttcaacaatg tagctaaaac |
| 8461 | ttgatgtaaa ttcctccttt ttttcctttt ttggcttaat gaatatcatt tattcagtat |
| 8521 | gaaatcttta tactatatgt tccacgtgtt aagaataaat gtacattaaa tcttggtaag |
| 8581 | acttt |

SEQ ID NO: 47 Human ARID1A Amino Acid Sequence isoform A (NP_006006.3)

| | |
|---|---|
| 1 | maaqvapaaa sslgnppppp pselkkaeqq qreeaggeaa aaaaaergem kaaagqeseg |
| 61 | pavgppqplg kelqdgaesn gggggggags gggpgaepdl knsngnagpr palnnnltep |
| 121 | pggggggssd gvgapphsaa aalpppaygf gqpygrspsa vaaaaaavfh qqhggqqspg |
| 181 | laalqsgggg glepyagpqq nshdhgfpnh qynsyypnrs aypppapaya lssprggtpg |
| 241 | sgaaaaagsk pppsssasas sssssfaqqr fgamggggps aagggtpqpt atptlnqllt |
| 301 | spssargyqg ypggdysggp qdggagkgpa dmasqcwgaa aaaaaaaaas ggaqqrshha |
| 361 | pmspgssggg gqplartpqp sspmdqmgkm rpqpyggtnp ysqqqgppsg pqqghgypgq |
| 421 | pygsqtpqry pmtmqgraqs amgglsytqq ippygqqgps gygqqgqtpy ynqqsphpqq |
| 481 | qqppysqqpp sqtphaqpsy qqqpqsqppq lqssqppysq qpsqpphqqs papypsqqst |
| 541 | tqqhpqsqpp ysqpqaqspy qqqqpqqpap stlsqqaayp qpqsqqsqqt aysqqrfppp |
| 601 | qelsqdsfgs qassapsmts skggqedmnl slqsrpsslp dlsgsiddlp mgtegalspg |
| 661 | vstsgisssq geqsnpaqsp fsphtsphlp girgpspspv gspasvaqsr sgplspaavp |
| 721 | gnqmpprpps gqsdsimhps mnqssiaqdr gymqrnpqmp qysspqpgsa lsprqpsggq |
| 781 | ihtgmgsyqq nsmgsygpqg gqygpqggyp rqpnynalpn anypsagmag ginpmgaggq |
| 841 | mhgqpgippy gtlppgrmsh asmgnrpygp nmanmppqvg sgmcpppggm nrktqetava |
| 901 | mhvaansiqn rppgypnmnq ggmmgtgppy gqginsmagm inpqgppysm ggtmannsag |
| 961 | maaspemmgl gdvkltpatk mnnkadgtpk teskskksss stttnekitk lyelggeper |
| 1021 | kmwvdrylaf teekamgmtn lpavgrkpld lyrlyvsvke iggltqvnkn kkwrelatnl |
| 1081 | nvgtsssaas slkkqyiqcl yafeckierg edpppdifaa adskksqpki qppspagsgs |
| 1141 | mqgpqtpqst sssmaeggdl kpptpastph sqipplpgms rsnsvgiqda fndgsdstfq |
| 1201 | krnsmtpnpg yqpsmntsdm mgrmsyepnk dpygsmrkap gsdpfmssgq gpnggmgdpy |
| 1261 | sraagpglgn vamgprqhyp yggpydrvrt epgigpegnm stgapqpnlm psnpdsgmys |
| 1321 | psryppqqqq qqqqrhdsyg nqfstqgtps gspfpsqqtt myqqqqqnyk rpmdgtygpp |
| 1381 | akrhegemys vpystgqgqp qqqqlppaqp qpasqqqaaq pspqqdvynq ygnaypatat |
| 1441 | aaterrpagg pqnqfpfqfg rdrvsappgt naqqnmppqm mggpiqasae vaqqgtmwqg |
| 1501 | rndmtynyan rqstgsapqg payhgvnrtd emlhtdqran hegswpshgt rqppygpsap |
| 1561 | vppmtrppps nyqpppsman hipqvsspap lprpmenrts pskspflhsg mkmqkagppv |
| 1621 | pashiapapv qppmirrdit fppgsveatq pvlkqrrrlt mkdigtpeaw rvmmslksgl |
| 1681 | laestwaldt inillyddns imtfnlsqlp gllellveyf rrclieifgi lkeyevgdpg |
| 1741 | qrtlldpgrf skvsspapme ggeeeeellg pkleeeeeee vvendeeiaf sgkdkpasen |
| 1801 | seekliskfd klpvkivqkn dpfvvdcsdk lgrvqefdsg llhwrigggd ttehiqthfe |
| 1861 | sktellpsrp hapcppaprk hvttaegtpg ttdqegpppd gppekritat mddmlstrss |
| 1921 | tltedgakss eaikesskfp fgispaqshr nikiledeph skdetplctl ldwqdslakr |
| 1981 | cvcvsntirs lsfvpgndfe mskhpgllli lgklillhhk hperkqaplt yekeeeqdqg |
| 2041 | vscnkvewww dclemlrent lvtlanisgq ldlspypesi clpvldgllh wavcpsaeaq |
| 2101 | dpfstlgpna vlspqrlvle tlsklsiqdn nvdlilatpp fsrleklyst mvrflsdrkn |
| 2161 | pvcremavvl lanlaqgdsl aaraiavqkg signllgfle dslaatqfqq sqasllhmqn |
| 2221 | ppfeptsvdm mrraaralla lakvdenhse ftlyesrlld isvsplmnsl vsqvicdvlf |
| 2281 | ligqs |

SEQ ID NO: 48 Human ARID1A cDNA Sequence Variant 2 (NM_139135.2, CDS:
from 374 to 6580)

| | |
|---|---|
| 1 | cagaaagcgg agagtcacag cggggccagg ccctggggag cggagcctcc accgcccccc |
| 61 | tcattcccag gcaagggctt ggggggaatg agccgggaga gccgggtccc gagcctacag |
| 121 | agccgggagc agctgagccg ccggcgcctc ggccgccgcc gccgcctcct cctcctccgc |
| 181 | cgccgccagc ccggagcctg agccggcggg gcggggggga gaggagcgag cgcagcgcag |
| 241 | cagcggagcc ccgcgaggcc cgcccgggcg ggtggggagg gcagcccggg ggactgggcc |
| 301 | ccggggcggg gtgggagggg gggagaagac gaagacaggg ccgggtctct ccgcggacga |
| 361 | gacagcgggg atcatggccg cgcaggtcgc ccccgccgcc gccagcagcc tgggcaaccc |
| 481 | gggcgaggcg gcggcggcgg cagcggccga gcgcggggaa atgaaggcag ccgccgggca |
| 541 | ggaaagcgag ggccccgccg tggggccgcc gcagccgctg ggaaaggagc tgcaggacgg |
| 601 | ggccgagagc aatgggggtg gcggcggcgg cggagccggc agcggcggcg ggcccggcgc |
| 661 | ggagccggac ctgaagaact cgaacgggaa cgcgggccct aggcccgccc tgaacaataa |
| 721 | cctcacggag ccgcccggcg gcggcggtgg cggcagcagc gatggggtgg gggcgcctcc |
| 781 | tcactcagcc gcggccgcct tgccgccccc agcctacggc ttcgggcaac cctacggccg |
| 841 | gagcccgtct gccgtcgccg ccgccgcggc cgccgtcttc caccaacaac atggcggaca |
| 901 | acaaagccct ggcctggcag cgctgcagag cggcggcggc gggggcctgg agccctacgc |
| 961 | ggggccccag cagaactctc acgaccacgg cttccccaac caccagtaca actcctacta |
| 1021 | ccccaaccgc agcgcctacc ccccgcccgc cccggcctac gcgctgagct ccccgagagg |
| 1081 | tggcactccg ggctccggcg cggcggcggc tgccggctcc aagccgcctc cctcctccag |
| 1141 | cgcctccgcc tcctcgtcgt cttcgtcctt cgctcagcag cgcttcgggg ccatgggggg |
| 1201 | aggcggcccc tccgcggccg gcgggggaac tccccagccc accgccaccc ccaccctcaa |
| 1261 | ccaactgctc acgtcgccca gctcggcccg gggctaccag ggctaccccg ggggcgacta |
| 1321 | cagtggcggg ccccaggacg ggggcgccgg caagggcccg gcggacatgg cctcgcagtg |
| 1381 | ttggggggct gcggcggcgg cagctgcggc ggcggccgcc tcgggagggg cccaacaaag |
| 1441 | gagccaccac gcgcccatga gccccgggag cagcggcggc ggggggcagc cgctcgcccg |
| 1501 | gacccctcag ccatccagtc caatggatca gatgggcaag atgagacctc agccatatgg |
| 1561 | cgggactaac ccatactcgc agcaacaggg acctccgtca ggaccgcagc aaggacatgg |
| 1621 | gtacccaggg cagccatacg ggtcccagac cccgcagcgg tacccgatga ccatgcaggg |
| 1681 | ccgggcgcag agtgccatgg gcggcctctc ttatacacag cagattcctc cttatggaca |
| 1741 | acaaggcccc agcgggtatg gtcaacaggg ccagactcca tattacaacc agcaaagtcc |
| 1801 | tcaccctcag cagcagcagc caccctactc ccagcaacca ccgtcccaga cccctcatgc |
| 1861 | ccaaccttcg tatcagcagc agccacagtc tcaaccacca cagctccagt cctctcagcc |
| 1921 | tccatactcc cagcagccat cccagcctcc acatcagcag tccccggctc catacccctc |
| 1981 | ccagcagtcg acgacacagc agcaccccca gagccagccc ccctactcac agccacaggc |
| 2041 | tcagtctcct taccagcagc agcaacctca gcagccagca ccctcgacgc tctcccagca |
| 2101 | ggctgcgtat cctcagcccc agtctcagca gtcccagcaa actgcctatt cccagcagcg |
| 2161 | cttccctcca ccgcaggagc tatctcaaga ttcatttggg tctcaggcat cctcagcccc |
| 2221 | ctcaatgacc tccagtaagg gagggcaaga agatatgaac ctgagccttc agtcaagacc |
| 2281 | ctccagcttg cctgatctat ctggttcaat agatgacctc cccatgggga cagaaggagc |
| 2341 | tctgagtcct ggagtgagca catcagggat ttccagcagc caaggagagc agagtaatcc |
| 2401 | agctcagtct cctttctctc ctcatacctc ccctcacctg cctggcatcc gaggcccttc |
| 2461 | cccgtcccct gttggctctc ccgccagtgt tgctcagtct cgctcaggac cactctcgcc |
| 2521 | tgctgcagtg ccaggcaacc agatgccacc tcggccaccc agtggccagt cggacagcat |
| 2581 | catgcatcct tccatgaacc aatcaagcat tgcccaagat cgaggttata tgcagaggaa |
| 2641 | cccccagatg ccccagtaca gttcccccca gcccggctca gccttatctc cgcgtcagcc |
| 2701 | ttccggagga cagatacaca caggcatggg ctcctaccag cagaactcca tggggagcta |
| 2761 | tggtccccag gggggtcagt atggcccaca aggtggctac cccaggcagc caaactataa |
| 2821 | tgccttgccc aatgccaact accccagtgc aggcatggct ggaggcataa accccatggg |
| 2881 | tgccggaggt caaatgcatg gacagcctgg catcccacct tatggcacac tccctccagg |
| 2941 | gaggatgagt cacgcctcca tgggcaaccg gccttatggc cctaacatgg ccaatatgcc |
| 3001 | acctcaggtt gggtcaggga tgtgtccccc accagggggc atgaaccgga aaacccaaga |
| 3061 | aactgctgtc gccatgcatg ttgctgccaa ctctatccaa aacaggccgc caggctaccc |
| 3121 | caatatgaat caagggggca tgatgggaac tggacctcct tatggacaag ggattaatag |
| 3181 | tatggctggc atgatcaacc ctcagggacc cccatattcc atgggtggaa ccatggccaa |
| 3241 | caattctgca gggatggcag ccagcccaga gatgatgggc cttggggatg taaagttaac |
| 3301 | tccagccacc aaaatgaaca acaaggcaga tgggacaccc aagacagaat ccaaatccaa |
| 3361 | gaaatccagt tcttctacta caaccaatga gaagatcacc aagttgtatg agctgggtgg |
| 3421 | tgagcctgag aggaagatgt gggtggaccg ttatctggcc ttcactgagg agaaggccat |
| 3481 | gggcatgaca aatctgcctg ctgtgggtag gaaacctctg gacctctatc gcctctatgt |
| 3541 | gtctgtgaag gagattggtg gattgactca ggtcaacaag aacaaaaaat ggcgggaact |
| 3601 | tgcaaccaac ctcaatgtgg gcacatcaag cagtgctgcc agctccttga aaaagcagta |
| 3661 | tatccagtgt ctctatgcct ttgaatgcaa gattgaacgg ggagaagacc ctcccccaga |
| 3721 | catctttgca gctgctgatt ccaagaagtc ccagcccaag atccagcctc cctctcctgc |
| 3781 | gggatcagga tctatgcagg ggccccagac tccccagtca accagcagtt ccatggcaga |
| 3841 | aggaggagac ttaaagccac caactccagc atccacacca cacagtcaga tccccccatt |
| 3901 | gccaggcatg agcaggagca attcagttgg gatccaggat gcctttaatg atggaagtga |
| 3961 | ctccacattc cagaagcgga attccatgac tccaaaccct gggtatcagc ccagtatgaa |
| 4021 | tacctctgac atgatggggc gcatgtccta tgagccaaat aaggatcctt atggcagcat |
| 4081 | gaggaaagct ccagggagtg atcccttcat gtcctcaggg cagggcccca acggcgggat |
| 4141 | gggtgacccc tacagtcgtg ctgccggccc tgggctagga aatgtggcga tgggaccacg |
| 4201 | acagcactat ccctatggag gtccttatga cagagtgagg acggagcctg gaatagggcc |
| 4261 | tgagggaaac atgagcactg gggccccaca gccgaatctc atgccttcca acccagactc |
| 4321 | ggggatgtat tctcctagcc gctacccccc gcagcagcag cagcagcagc agcaacgaca |
| 4381 | tgattcctat ggcaatcagt tctccaccca aggcacccct tctggcagcc ccttccccag |
| 4441 | ccagcagact acaatgtatc aacagcaaca gcaggtatcc agccctgctc ccctgccccg |
| 4501 | gccaatggag aaccgcacct ctcctagcaa gtctccattc ctgcactctg ggatgaaaat |
| 4561 | gcagaaggca ggtcccccag tacctgcctc gcacatagca cctgcccctg tgcagccccc |
| 4621 | catgattcgg cgggatatca ccttcccacc tggctctgtt gaagccacac agcctgtgtt |
| 4681 | gaagcagagg aggcggctca caatgaaaga cattggaacc ccggaggcat ggcgggtaat |
| 4741 | gatgtccctc aagtctggtc tcctggcaga gagcacatgg gcattagata ccatcaacat |
| 4801 | cctgctgtat gatgacaaca gcatcatgac cttcaacctc agtcagctcc cagggttgct |
| 4861 | agagctcctt gtagaatatt tccgacgatg cctgattgag atctttggca ttttaaagga |
| 4921 | gtatgaggtg ggtgacccag gacagagaac gctactggat cctgggaggt tcagcaaggt |
| 4981 | gtctagtcca gctcccatgg agggtgggga agaagaagaa gaacttctag gtcctaaact |
| 5041 | agaagaggaa gaagaagagg aagtagttga aaatgatgag gagatagcct tttcaggcaa |
| 5101 | ggacaagcca gcttcagaga atagtgagga gaagctgatc agtaagtttg acaagcttcc |
| 5161 | agtaaagatc gtacagaaga atgatccatt tgtggtggac tgctcagata agcttgggcg |
| 5221 | tgtgcaggag tttgacagtg gcctgctgca ctggcggatt ggtggggggg acaccactga |
| 5281 | gcatatccag acccacttcg agagcaagac agagctgctg ccttcccggc ctcacgcacc |
| 5341 | ctgcccacca gcccctcgga agcatgtgac aacagcagag ggtacaccag ggacaacaga |
| 5401 | ccaggagggg cccccacctg atggacctcc agaaaaacgg atcacagcca ctatggatga |
| 5461 | catgttgtct actcggtcta gcaccttgac cgaggatgga gctaagagtt cagaggccat |
| 5521 | caaggagagc agcaagtttc catttggcat tagcccagca cagagccacc ggaacatcaa |
| 5581 | gatcctagag gacgaacccc acagtaagga tgagacccca ctgtgtaccc ttctggactg |
| 5641 | gcaggattct cttgccaagc gctgcgtctg tgtgtccaat accattcgaa gcctgtcatt |
| 5701 | tgtgccaggc aatgactttg agatgtccaa acacccaggg ctgctgctca tcctgggcaa |
| 5761 | gctgatcctg ctgcaccaca agcacccaga acggaagcag gcaccactaa cttatgaaaa |
| 5821 | ggaggaggaa caggaccaag gggtgagctg caacaaagtg gagtggtggt gggactgctt |
| 5881 | ggagatgctc cgggaaaaca ccttggttac actcgccaac atctcggggc agttggacct |
| 5941 | atctccatac cccgagagca tttgcctgcc tgtcctggac ggactcctac actgggcagt |
| 6001 | ttgcccttca gctgaagccc aggacccctt ttccaccctg ggccccaatg ccgtcctttc |
| 6061 | cccgcagaga ctggtcttgg aaaccctcag caaactcagc atccaggaca acaatgtgga |
| 6121 | cctgattctg gccacacccc ccttcagccg cctggagaag ttgtatagca ctatggtgcg |
| 6181 | cttcctcagt gaccgaaaga acccggtgtg ccgggagatg gctgtggtac tgctggccaa |
| 6241 | cctggctcag ggggacagcc tggcagctcg tgccattgca gtgcagaagg gcagtatcgg |
| 6301 | caacctcctg ggcttcctag aggacagcct tgccgccaca cagttccagc agagccaggc |
| 6361 | cagcctcctc cacatgcaga acccaccctt tgagccaact agtgtggaca tgatgcggcg |
| 6421 | ggctgcccgc gcgctgcttg ccttggccaa ggtggacgag aaccactcag agtttactct |
| 6481 | gtacgaatca cggctgttgg acatctcggt atcaccgttg atgaactcat tggtttcaca |
| 6541 | agtcatttgt gatgtactgt ttttgattgg ccagtcatga cagccgtggg acacctcccc |
| 6601 | cccccgtgtg tgtgtgcgtg tgtggagaac ttagaaactg actgttgccc tttatttatg |
| 6661 | caaaaccacc tcagaatcca gtttaccctg tgctgtccag cttctccctt gggaaaaagt |
| 6721 | ctctcctgtt tctctctcct ccttccacct cccctccctc catcacctca cgcctttctg |
| 6781 | ttccttgtcc tcaccttact cccctcagga ccctacccca ccctctttga aaagacaaag |
| 6841 | ctctgcctac atagaagact ttttttattt taaccaaagt tactgttgtt tacagtgagt |
| 6901 | ttggggaaaa aaaataaaat aaaaatggct ttcccagtcc ttgcatcaac gggatgccac |
| 6961 | atttcataac tgtttttaat ggtaaaaaaa aaaaaaaaaa atacaaaaaa aaattctgaa |
| 7021 | ggacaaaaaa ggtgactgct gaactgtgtg tggtttattg ttgtacattc acaatcttgc |
| 7081 | aggagccaag aagttcgcag ttgtgaacag accctgttca ctggagaggc ctgtgcagta |
| 7141 | gagtgtagac cctttcatgt actgtactgt acacctgata ctgtaaacat actgtaataa |
| 7201 | taatgtctca catggaaaca gaaaacgctg ggtcagcagc aagctgtagt ttttaaaaat |
| 7261 | gtttttagtt aaacgttgag gagaaaaaaa aaaaaggctt ttcccccaaa gtatcatgtg |
| 7321 | tgaacctaca acaccctgac ctctttctct cctccttgat tgtatgaata accctgagat |
| 7381 | cacctcttag aactggtttt aacctttagc tgcagcggct acgctgccac gtgtgtatat |
| 7441 | atatgacgtt gtacattgca catacccttg gatccccaca gtttggtcct cctcccagct |
| 7501 | acccctttat agtatgacga gttaacaagt tggtgacctg cacaaagcga gacacagcta |
| 7561 | tttaatctct tgccagatat cgcccctctt ggtgcgatgc tgtacaggtc tctgtaaaaa |
| 7621 | gtccttgctg tctcagcagc caatcaactt atagtttatt tttttctggg tttttgtttt |
| 7681 | gttttgtttt ctttctaatc gaggtgtgaa aaagttctag gttcagttga agttctgatg |
| 7741 | aagaaacaca attgagattt tttcagtgat aaaatctgca tatttgtatt tcaacaatgt |
| 7801 | agctaaaact tgatgtaaat tcctcctttt tttccttttt tggcttaatg aatatcattt |
| 7861 | attcagtatg aaatctttat actatatgtt ccacgtgtta agaataaatg tacattaaat |
| 7921 | cttggtaaga cttt |

SEQ ID NO: 49 Human ARID1A Amino Acid Sequence isoform B (NP 624361.1)

| | |
|---|---|
| 1 | maaqvapaaa sslgnppppp pselkkaeqq qreeaggeaa aaaaaergem kaaagqeseg |
| 61 | pavgppqplg kelqdgaesn gggggggags gggpgaepdl knsngnagpr palnnnltep |
| 121 | pggggggssd gvgapphsaa aalpppaygf gqpygrspsa vaaaaaavfh qqhggqqspg |
| 181 | laalqsgggg glepyagpqq nshdhgfpnh qynsyypnrs aypppapaya lssprggtpg |
| 241 | sgaaaaagsk pppsssasas sssssfaqqr fgamggggps aagggtpqpt atptinqllt |
| 301 | spssargyqg ypggdysggp qdggagkgpa dmasqcwgaa aaaaaaaaas ggaqqrshha |
| 361 | pmspgssggg gqplartpqp sspmdqmgkm rpqpyggtnp ysqqqgppsg pqqghgypgq |
| 421 | pygsqtpqry pmtmqgraqs amgglsytqq ippygqqgps gygqqgqtpy ynqqsphpqq |
| 481 | qqppysqqpp sqtphaqpsy qqqpqsqppq lassqppysq qpsqpphqqs papypsqqst |
| 541 | tqqhpqsqpp ysqpqaqspy qqqqpqqpap stlsqqaayp qpqsqqsqqt aysqqrfppp |
| 601 | qelsqdsfgs qassapsmts skggqedmnl slqsrpsslp dlsgsiddlp mgtegalspg |
| 661 | vstsgisssq geqsnpaqsp fsphtsphlp girgpspspv gspasvaqsr sgplspaavp |
| 721 | gnqmpprpps gqsdsimhps mnqssiaqdr gymqrnpomp qysspqpgsa lsprqpsggq |
| 781 | ihtgmgsyqq nsmgsygpqg gqygpqggyp rqpnynalpn anypsagmag ginpmgaggq |
| 841 | mhgqpgippy gtlppgrmsh asmgnrpygp nmanmppqvg sgmcpppggm nrktqetava |
| 901 | mhvaansiqn rppgypnmnq ggmmgtgppy gqginsmagm inpqgppysm ggtmannsag |
| 961 | maaspemmgl gdvkltpatk mnnkadgtpk teskskksss stttnekitk lyelggeper |
| 1021 | kmwvdrylaf teekamgmtn lpavgrkpld lyrlyvsvke iggltqvnkn kkwrelatnl |
| 1081 | nvgtsssaas slkkqyiqcl yafeckierg edpppdifaa adskksqpki qppspagsgs |
| 1141 | mqgpqtpqst sssmaeggdl kpptpastph sqipplpgms rsnsvgiqda fndgsdstfq |
| 1201 | krnsmtpnpg yqpsmntsdm mgrmsyepnk dpygsmrkap gsdpfmssgq gpnggmgdpy |
| 1261 | sraagpglgn vamgprqhyp yggpydrvrt epgigpegnm stgapqpnlm psnpdsgmys |
| 1321 | psryppqqqq qqqqrhdsyg nqfstqgtps gspfpsqqtt myqqqqqvss paplprpmen |
| 1381 | rtspskspfl hsgmkmqkag ppvpashiap apvoppmirr ditfppgsve atqpvlkqrr |
| 1441 | rltmkdigtp eawrvmmslk sgllaestwa ldtinillyd dnsimtfnls qlpgllellv |
| 1501 | eyfrrcliei fgilkeyevg dpgqrtlldp grfskvsspa pmeggeeeee llgpkleeee |
| 1561 | eeevvendee iafsgkdkpa senseeklis kfdklpvkiv qkndpfvvdc sdklgrvqef |
| 1621 | dsgllhwrig ggdttehiqt hfesktellp srphapcppa prkhvttaeg tpgttdqegp |
| 1681 | ppdgppekri tatmddmlst rsstltedga ksseaikess kfpfgispaq shrnikiled |
| 1741 | ephskdetpl ctlldwqdsl akrcvcvsnt irslsfvpgn dfemskhpgl llilgklill |
| 1801 | hhkhperkqa pltyekeeeq dqgvsonkve wwwdclemlr entlvtlani sgqldlspyp |
| 1861 | esiclpvldg Ilhwavcpsa eaqdpfstlg pnavlspqrl vletlsklsi qdnnvdlila |
| 1921 | tppfsrlekl ystmvrflsd rknpvcrema vvllanlaqg dslaaraiav qkgsignllg |
| 1981 | fledslaatq fqqsqasllh mqnppfepts vdmmrraara llalakvden hseftlyesr |
| 2041 | lldisvsplm nslvsqvicd vlfligqs |

SEQ ID NO: 50 Mouse ARID1A cDNA Sequence (NM_001080819.1, CDS: from 1
to 6852)

| | |
|---|---|
| 1 | atggccgcgc aggtcgcccc cgccgccgcc agcagcctgg gcaacccgcc gccgccgccc |
| 61 | tcggagctga agaaagccga gcagcaacag cgggaggagg cggggggcga ggcggcggcg |
| 121 | gcagcggccg agcgcgggga aatgaaggca gccgccgggc aggagagcga gggccccgcc |
| 181 | gtggggccgc cgcagccgct gggaaaggag ctgcaggacg gggccgagag caatgggggt |
| 241 | ggcggcggcg gcggagccgg cagcggcggc gggcccggcg cggagccgga cctgaagaac |
| 301 | tcgaacggga acgcgggccc taggcccgcc ctgaacaata acctcccgga gccgcccggc |
| 361 | ggcggcggcg gcggcggcag cagcagcagc gacggggtgg gggcgcctcc tcactcggcc |
| 421 | gcggccgccc tgccgccccc agcctacggc ttcgggcaag cctacggccg gagcccgtct |
| 481 | gccgtcgccg ccgcggcggc cgccgtcttc caccaacaac atggcggaca acaaagccct |
| 541 | ggcctggcag cgctgcagag cggcggcggc gggggcttgg agccctacgc cgggccccag |
| 601 | cagaactcgc acgaccacgg cttccccaac caccagtaca actcctacta ccccaaccgc |
| 661 | agcgcctacc ccccgcctcc ccaggcctac gcgctgagct ccccgagagg tggcactccg |
| 721 | ggctccggcg cggcggcggc cgccggctcc aagccgcctc cctcctccag cgcctctgcc |
| 781 | tcctcgtcgt cttcgtcctt cgcacagcag cgcttcgggg ccatgggggg aggcggcccc |
| 841 | tcagcggccg gcgggggaac tccccagccc accgccaccc ccaccctcaa ccaactgctc |
| 901 | acgtcgccca gctcggcccg tggctaccag ggctaccccg ggggcgacta cggcggcggg |
| 961 | ccccaggacg ggggcgcggg caaaggcccg gcggacatgg cctcgcagtg ctggggggct |
| 1021 | gcggcggcgg cggcggcggc ggcagcggcc gtctcgggag gggcccaaca aaggagccac |
| 1081 | cacgcgccca tgagccccgg gagcagcggc ggcggggggc agccgctcgc ccggacccct |
| 1141 | cagtcatcca gtccaatgga tcagatggga aagatgagac ctcagccgta tggtgggact |
| 1201 | aacccatact cgcaacaaca gggacctcct tcaggaccgc aacaaggaca tgggtaccca |
| 1261 | gggcagccat atgggtccca gactccacag cggtacccca tgaccatgca gggccgggct |
| 1321 | cagagtgcca tgggcagcct ctcttatgca cagcagattc caccttatgg ccagcaaggc |
| 1381 | cccagtgcgt atggccagca gggccagact ccatactata accagcaaag tcctcatccc |
| 1441 | cagcagcagc caccttacgc ccagcaacca ccatcccaga cccctcatgc ccagccttcg |
| 1501 | tatcagcagc agccgcagac tcagcaacca cagcttcagt cctctcagcc tccatattcc |
| 1561 | cagcagccat cccagcctcc acatcagcag tccccaactc catatccctc ccagcagtcc |
| 1621 | accacacaac agcatcccca gagccagccc ccctactcac aaccacaggc acagtctccc |
| 1681 | taccagcagc agcaacctca gcagccagca tcctcgtcgc tctcccagca ggctgcatat |
| 1741 | cctcagcccc agcctcagca gtcccagcaa actgcctatt cccagcagcg cttccctcca |
| 1801 | ccacaggagc tttctcaaga ttcatttggg tctcaggcat cctcagcccc ctcaatgacc |
| 1861 | tccagtaagg gagggcaaga agatatgaac ctgagtcttc agtcaaggcc ctccagcttg |
| 1921 | cctgatctgt ctggttcaat cgatgatctc cccatgggga cagaaggagc tctgagtcct |
| 1981 | ggcgtgagca catcagggat ttccagcagc caaggagagc agagcaatcc agctcagtct |
| 2041 | cccttttctc ctcacacctc ccctcacctg cctggcatcc gaggcccgtc cccgtcccct |
| 2101 | gttggctctc ctgccagtgt cgcgcagtct cgctcaggac cactctcgcc tgctgcagtg |
| 2161 | ccaggcaacc agatgccacc tcggccaccc agtggccagt cagacagcat catgcaccct |
| 2221 | tccatgaacc aatcaagcat tgcccaagat cgaggttata tgcagaggaa cccccagatg |
| 2281 | ccccagtaca cttcccctca gcctggctcg gccttatccc cacgtcagcc gtctggagga |
| 2341 | cagatgcact cgggcgtggg ctcctaccag cagaactcca tggggagcta cggcccccag |
| 2401 | ggcagtcagt atggcccaca aggaggctat cctaggcagc ctaactataa tgccttgccc |
| 2461 | aacgccaact accccaatgc aggcatggcc ggaagtatga accctatggg tgctggaggt |
| 2521 | cagatgcatg ggcagcctgg aatcccacct tacggcacac tccctccagg gagaatggct |
| 2581 | catgcgtcta tgggcaacag gccctatggc cctaatatgg ccaatatgcc acctcaggtt |
| 2641 | gggtcaggga tgtgtcctcc accaggggga atgaacagga aaactcaaga gtctgctgtt |
| 2701 | gccatgcatg ttgctgccaa ctctatccaa aacaggccac caggctaccc aaatatgaat |
| 2761 | caagggggca tgatgggaac tggacctccc tatggacagg ggatcaatag tatggctggc |
| 2821 | atgatcaacc ctcagggacc cccatatcct atgggtggaa ccatggccaa caattcagca |
| 2881 | gggatggcag ccagcccaga gatgatgggc cttggggatg ttaagttaac tcccgccaca |
| 2941 | aaaatgaaca acaaggcaga tggaacaccc aagacagaat ccaaatctaa gaaatccagt |
| 3001 | tcttctacca ccaccaatga gaagatcacc aaattgtatg agttgggtgg tgagcccgag |
| 3061 | aggaagatgt gggtggaccg gtacctggcc ttcacagagg agaaggccat gggcatgaca |
| 3121 | aatctgcctg ctgtggggag gaagcctctg gacctctatc gcctctatgt gtctgtgaag |
| 3181 | gagattggtg ggttgactca ggtcaacaag aacaaaaaat ggcgggaact tgcaaccaac |
| 3241 | ctcaatgtgg gtacatcaag cagtgctgcc agctcactga aaaagcagta tatccaatgt |
| 3301 | ctctatgcct ttgagtgcaa gatcgagcgt ggagaagacc ctccccccga tatcttcgca |
| 3361 | gctgctgact ccaagaagtc ccaacccaag atccagcccc cctctcctgc gggatcaggg |
| 3421 | tctatgcagg ggccacaaac tcctcagtca accagcagtt ctatggcaga aggaggagac |
| 3481 | ctgaagccac caactccagc atccacacca catagtcaaa ttcccccctt accaggcatg |
| 3541 | agcaggagca actcagtcgg aatccaggat gcctttcctg atggaagtga ccccacattc |
| 3601 | cagaagcgga attccatgac tccaaaccct gggtaccagc ccagtatgaa tacctctgac |
| 3661 | atgatggggc gcatgtccta tgagccaaat aaggatcctt atggcagcat gaggaaagcg |
| 3721 | ccaggaagtg atcccttcat gtcctcaggg cagggcccca atggcgggat gggtgatccc |
| 3781 | tacagccgtg ctgctggccc tgggctggga agtgtggcga tgggaccacg gcagcactat |
| 3841 | ccctatggag gtccttacga cagagtgagg acggagcctg gaatcgggcc tgaaggaaat |
| 3901 | atgggcactg gagcccctca gccaaatctc atgccttcca ccccagattc ggggatgtat |
| 3961 | tctcctagcc gctacccccc gcagcagcag cagcaacagc agcaacaaca tgattcctat |
| 4021 | ggcaatcaat tctctaccca aggcacccct tccagcagcc ccttccccag ccagcagacc |
| 4081 | acaatgtatc agcagcagca gcagaattat aagaggccaa tggatggcac atatggcccc |
| 4141 | cctgccaagc ggcatgaagg ggagatgtac agtgtgccgt acagcgctgg gcaaggccag |
| 4201 | cctcaacagc agcagttgcc tgcagctcag tcccagcctg ccagccagcc acaagctgcc |
| 4261 | cagccttccc ctcagcagga cgtgtacaac cagtacagca atgcctaccc tgcctccgcc |
| 4321 | accgctgcta ctgatcgccg accagcaggc ggcccccaga accaatttcc attccagttt |
| 4381 | ggccgagacc gagtctctgc acctcctggt tccagtgccc agcagaacat gccaccacaa |
| 4441 | atgatgggtg gccccataca ggcatcagct gaggttgctc agcagggcac catgtggcag |
| 4501 | gggcgaaatg acatgaccta caattatgcc aacaggcaga acacaggctc tgccacccag |
| 4561 | ggccctgcgt atcatggtgt gaaccgaaca gatgaaatgc tccacacaga tcagagggcc |
| 4621 | aaccatgaag gcccatggcc ttcccatggc acacgccagc ctccgtatgg tccttcagcc |
| 4681 | cctgttcccc ccatgacaag gccccctcca tctaactacc agcccccacc aagcatgccg |
| 4741 | aatcacattc ctcaggtatc cagccccgct cccctccccc ggcccatgga gaaccgtact |
| 4801 | tctcctagca agtctccatt cctgcactct gggatgaaaa tgcaaaaggc gggtccaccg |
| 4861 | gtgcctgctt cgcacatagc gcctacccct gtgcagccgc ctatgattcg gcgggatatc |
| 4921 | accttcccac ctggctctgt agaggccact cagcctgtgt tgaagcagag aaggcggctc |
| 4981 | acaatgaaag acattggaac cccggaggca tggcgggtaa tgatgtccct caagtccggg |
| 5041 | ctcctggcag agagcacgtg ggcgttagac accattaaca ttctactgta tgatgacaac |
| 5101 | agcattatga ccttcaacct cagccagctc ccaggcttgc tagagctcct tgtggaatat |
| 5161 | ttccgtagat gcctaattga aatctttggc attttaaagg agtatgaggt aggggaccca |
| 5221 | ggacagagaa cattactaga ccctgggaga ttcaccaagg tgtatagtcc agcccataca |
| 5281 | gaggaagaag aggaagaaca ccttgatcct aaactggagg aggaagagga agaaggggtt |
| 5341 | ggaaatgatg aggagatggc ctttttgggc aaggacaagc catcttcaga gaataatgag |
| 5401 | gagaagctag tcagtaagtt tgacaagctt ccggtaaaga tcgtgcagag gaatgaccca |
| 5461 | tttgtggtgg actgctcaga taagcttggg cgcgtgcagg agtttgacag tggcctgcta |
| 5521 | cactggcgga ttggtggtgg ggataccact gagcatatcc agacccactt tgagagcaag |
| 5581 | atagagctgc tgccttcccg gccttatgtg ccctgcccaa cgccccctcg gaaacacctc |
| 5641 | acaacagtag agggcacacc agggacaacg gagcaggagg gccccccgcc cgatggcctt |
| 5701 | ccagagaaaa ggatcacagc caccatggat gacatgttgt ctacccggtc tagcacattg |
| 5761 | actgatgagg gggcaaagag tgcagaggcc accaaggaaa gcagcaagtt tccatttggc |
| 5821 | attagcccag cacagagcca ccggaacatc aaaattttag aggatgaacc ccatagtaag |
| 5881 | gatgagaccc cactgtgtac ccttctggac tggcaggatt cccttgctaa gcgctgtgtc |
| 5941 | tgtgtctcca ataccatccg gagcctgtcg tttgtgccag gcaacgactt tgagatgtcc |
| 6001 | aaacacccag ggctgctgct tatcctgggc aagctgatcc tgctgcacca caagcaccca |
| 6061 | gagcggaagc aggcaccact aacttatgag aaggaggagg aacaggacca aggggtgagc |
| 6121 | tgtgacaaag tggagtggtg gtgggactgc ttggagatgc tccgagaaaa cacgctggtc |
| 6181 | accctcgcca acatctcggg gcaattggac ctatccccat atcctgagag catctgcctg |
| 6241 | cctgtcctgg acggactcct acactgggca gtttgccctt cagctgaagc ccaggacccc |
| 6301 | ttctcaaccc taggccccaa tgccgtcctc tccccccaga gattggtctt ggaaaccctc |
| 6361 | agcaaactca gcatccagga caacaatgtg gacctgatcc tggccactcc cccttttagc |
| 6421 | cgcctggaga agttgtatag taccatggtg cgcttcctca gtgaccgaaa gaacccagtg |
| 6481 | tgccgggaga tggccgtggt actgctggca aatctggccc agggggacag cctggcagcc |
| 6541 | cgggccattg cagtgcagaa gggcagcatc ggcaacctcc tgggtttcct ggaggacagc |
| 6601 | cttgctgcca cacagttcca gcagagccag gcaagcctcc tgcatatgca gaatccaccc |
| 6661 | tttgaaccaa ctagtgtgga catgatgcgg cgggctgccc gagcactgct tgccctggcc |
| 6721 | aaggtggatg agaaccactc agagttcact ctgtatgagt cacggctgtt ggacatctcc |
| 6781 | gtgtcaccac tgatgaactc attggtttca caagtcattt gtgatgtact gtttttgatt |
| 6841 | ggccagtcat gacagccgtg ggacacctcc cctccccgtg tgtgtgtgag tgtgtggaga |
| 6901 | acttagaaac tgactgttgc cctttattta tgcaaaacca cctcagaatc cagtttaccc |
| 6961 | tgtgctgtcc agcttctccc ttgggaaagc ctctcctgtt ctctctcctc cccaccctca |
| 7021 | ctccctcaca cctttctgtt ccccatcctc acctgcttcc ctcaggaccc caccctattt |
| 7081 | gaaaagacaa agctctgcct acatagaaga cttttttatt ttaaccaaag ttactgttgt |
| 7141 | ttacagtgag tttggggaaa aaaatggctt tcccagtcct tgcatcaacg ggatgccaca |
| 7201 | tttcataact gtttttaatg gttaaaaaaa aaaaaaaaaa aaggaaaaaa aatacaaaaa |
| 7261 | aaccctgaag gacaaaggtg actgctgagc tgtgtggttt gtcgctgtcc attcacaatc |
| 7321 | tcgcaggagc cgagaagttc gcagttgtga gcagaccctg ttcactggag aggcctgtgc |
| 7381 | agtagagtgt agatcctttc atgtactgta ctgtacacct gatactgtaa acatactgta |
| 7441 | ataataatgt ctcacatgga aacgagagaa gacgctgggt cagcagcaag ctgtagtttt |
| 7501 | taaaaatgtt tttagttaaa tgttgaggag aaaaaaaatg gctttccccc caaagtatcc |
| 7561 | tgtgtgaacc tacaacgccc tgacctcttt ctctcctcct tgattgtatg aatagccctg |
| 7621 | agatcacctc ttagacctgg ttttaacctt tagctgcagc ggctgcgctg ccacgtgtgt |
| 7681 | atatatatga tgttgtacat tgcacatacc cttgaatctc cacagtttgg tccccttccc |
| 7741 | agctacccct ttatagtatg gcgagttaac aagttggtga cctgcacaaa gcgagacaca |
| 7801 | gctatttaat ctcttgccag acattgcccc tcttggtgca gtgctctaca ggtctctgta |
| 7861 | aaaagccctt gctgtctcag cagccaatca acttacagtt tatttttttc tgggtttttg |
| 7921 | ttttgttttg tttcatttct aatcgaggtg tgaaaaagtt ctaggttcag ttgaagttcc |
| 7981 | tgatgaagaa acacaattga gattttttca gtgataaaat ctgcatattt gtatttcaac |
| 8041 | aatgtagcta aaaacttgat gtaaattcct cctttttttt ccttttttgg cttaatgaat |
| 8101 | atcatttatt cagtatgaaa tctttatact atatgttcca cgtgttaaga ataaatgtac |
| 8161 | attaaatctt ggtaa |

SEQ ID NO: 51 Mouse ARID1A Amino Acid Sequence (NP_001074288.1)

| | |
|---|---|
| 1 | maaqvapaaa sslgnppppp selkkaeqqq reeaggeaaa aaaergemka aagqesegpa |
| 61 | vgppqplgke lqdgaesngg gggggagsgg gpgaepdlkn sngnagprpa lnnnlpeppg |
| 121 | ggggggssss dgvgapphsa aaalpppayg fgqaygrsps avaaaaaavf hqqhggqqsp |
| 181 | glaalqsggg gglepyagpq qnshdhgfpn hqynsyypnr sayppppqay alssprggtp |
| 241 | gsgaaaaags kpppsssasa ssssssfaqq rfgamggggp saagggtpqp tatptlnqll |
| 301 | tspssargyq gypggdyggg pqdggagkgp admasqcwga aaaaaaaaaa vsggaqqrsh |
| 361 | hapmspgssg gggqplartp qssspmdqmg kmrpqpyggt npysqqqgpp sgpqqghgyp |
| 421 | gqpygsqtpq rypmtmqgra qsamgslsya qqippygqqg psaygqqgqt pyynqqsphp |
| 481 | qqqppyaqqp psqtphaqps yqqqpqtqqp qlqssqppys qqpsqpphqq sptpypsqqs |
| 541 | ttqqhpqsqp pysqpqaqsp yqqqqpqqpa ssslsqqaay pqpqpqqsqq taysqqrfpp |
| 601 | pqelsqdsfg sqassapsmt sskggqedmn lslqsrpssl pdlsgsiddl pmgtegalsp |
| 661 | gvstsgisss qgeqsnpaqs pfsphtsphl pgirgpspsp vgspasvags rsgplspaav |
| 721 | pgnqmpprpp sgqsdsimhp smnqssiaqd rgymqrnpqm pqytspqpgs alsprqpsgg |
| 781 | qmhsgvgsyq qnsmgsygpq gsqygpqggy prqpnynalp nanypnagma gsmnpmgagg |
| 841 | qmhgqpgipp ygtlppgrma hasmgnrpyg pnmanmppqv gsgmcpppgg mnrktqesav |
| 901 | amhvaansiq nrppgypnmn qggmmgtgpp ygqginsmag minpqgppyp mggtmannsa |
| 961 | gmaaspemmg lgdvkltpat kmnnkadgtp kteskskkss sstttnekit klyelggepe |
| 1021 | rkmwvdryla fteekamgmt nlpavgrkpl dlyrlyvsvk eiggltqvnk nkkwrelatn |
| 1081 | lnvgtsssaa sslkkqyiqc lyafeckier gedpppdifa aadskksqpk iqppspagsg |
| 1141 | smqgpqtpqs tsssmaeggd lkpptpastp hsqipplpgm srsnsvgiqd afpdgsdptf |
| 1201 | qkrnsmtpnp gyqpsmntsd mmgrmsyepn kdpygsmrka pgsdpfmssg qgpnggmgdp |
| 1261 | ysraagpglg svamgprqhy pyggpydrvr tepgigpegn mgtgapqpnl mpstpdsgmy |
| 1321 | spsryppqqq qqqqqqhdsy gnqfstqgtp ssspfpsqqt tmyqqqqqny krpmdgtygp |
| 1381 | pakrhegemy svpysagqgq pqqqqlpaaq sqpasqpqaa qpspqqdvyn qysnaypasa |
| 1441 | taatdrrpag gpqnqfpfqf grdrvsappg ssaqqnmppq mmggpiqasa evaqqgtmwq |
| 1501 | grndmtynya nrqntgsatq gpayhgvnrt demlhtdqra nhegpwpshg trqppygpsa |
| 1561 | pvppmtrppp snyqpppsmp nhipqvsspa plprpmenrt spskspflhs gmkmqkagpp |
| 1621 | vpashiaptp vqppmirrdi tfppgsveat qpvlkqrrrl tmkdigtpea wrvmmslksg |
| 1681 | llaestwald tinillyddn simtfnlsql pgllellvey frrclieifg ilkeyevgdp |
| 1741 | gqrtlldpgr ftkvyspaht eeeeeehldp kleeeeeegv gndeemaflg kdkpssenne |
| 1801 | eklvskfdkl pvkivqrndp fvvdcsdklg rvqefdsgll hwrigggdtt ehiqthfesk |
| 1861 | iellpsrpyv pcptpprkhl ttvegtpgtt eqegpppdgl pekritatmd dmlstrsstl |
| 1921 | tdegaksaea tkesskfpfg ispaqshrni kiledephsk detplctlld wqdslakrcv |
| 1981 | cvsntirsls fvpgndfems khpglllilg klillhhkhp erkqapltye keeeqdqgvs |
| 2041 | cdkvewwwdc lemlrentlv tlanisgqld lspypesicl pvldgllhwa vcpsaeaqdp |
| 2101 | fstlgpnavl spqrlvletl sklsiqdnnv dlilatppfs rleklystmv rflsdrknpv |
| 2161 | cremavvlla nlaqgdslaa raiavqkgsi gnllgfleds laatqfqqsq asllhmqnpp |
| 2221 | feptsvdmmr raarallala kvdenhseft lyesrlldis vsplmnslvs qvicdvlfli |
| 2281 | gqs |

SEQ ID NO: 52 Human ARID1B cDNA Sequence Variant 1 (NM_017519.2, CDS:
from 1 to 6711)

| | |
|---|---|
| 1 | atggcccata acgcgggcgc cgcggccgcc gccggcaccc acagcgccaa gagcggcggc |
| 61 | tccgaggcgg ctctcaagga gggtggaagc gccgccgcgc tgtcctcctc ctcctcctcc |
| 121 | tccgcggcgg cagcggcggc atcctcttcc tcctcgtcgg gcccgggctc ggccatggag |
| 181 | acggggctgc tccccaacca caaactgaaa accgttggcg aagcccccgc cgcgccgccc |
| 241 | caccagcagc accaccacca ccaccatgcc caccaccacc accaccatgc ccaccacctc |
| 301 | caccaccacc acgcactaca gcagcagcta aaccagttcc agcagcagca gcagcagcag |
| 361 | caacagcagc agcagcagca gcagcaacag caacatccca tttccaacaa caacagcttg |
| 421 | ggcggcgcgg gcggcggcgc gcctcagccc ggccccgaca tggagcagcc gcaacatgga |
| 481 | ggcgccaagg acagtgctgc gggcggccag gccgaccccc cgggcccgcc gctgctgagc |
| 541 | aagccgggcg acgaggacga cgcgccgccc aagatggggg agccggcggg cggccgctac |
| 601 | gagcacccgg gcttgggcgc cctgggcacg cagcagccgc cggtcgccgt gcccgggggc |
| 661 | ggcggcggcc cggcggccgt cccggagttt aataattact atggcagcgc tgcccctgcg |
| 721 | agcggcggcc ccggcggccg cgctgggcct tgctttgatc aacatggcgg acaacaaagc |
| 781 | cccgggatgg ggatgatgca ctccgcctcc gccgccgccg ccggggcccc cggcagcatg |
| 841 | gaccccctgc agaactccca cgaagggtac cccaacagcc agtgcaacca ttatccgggc |
| 901 | tacagccggc ccggcgcggg cggcggcggc ggcggcggcg gcggaggagg aggaggcagc |
| 961 | ggaggaggag gaggaggagg aggagcagga gcaggaggag caggagcggg agctgtggcg |
| 1021 | gcggcggccg cggcggcggc ggcagcagca ggaggcggcg gcggcggcgg ctatgggggc |
| 1081 | tcgtccgcgg ggtacggggt gctgagctcc ccccggcagc agggcggcgg catgatgatg |
| 1141 | ggccccgggg gcggcggggc cgcgagcctc agcaaggcgg ccgccggctc ggcggcgggg |
| 1201 | ggcttccagc gcttcgccgg ccagaaccag cacccgtcgg gggccacccc gaccctcaat |
| 1261 | cagctgctca cctcgcccag ccccatgatg cggagctacg gcggcagcta ccccgagtac |
| 1321 | agcagcccca gcgcgccgcc gccgccgccg tcgcagcccc agtcccaggc ggcggcggcg |
| 1381 | ggggcggcgg cgggcggcca gcaggcggcc gcgggcatgg gcttgggcaa ggacatgggc |
| 1441 | gcccagtacg ccgctgccag cccggcctgg gcggccgcgc aacaaaggag tcacccggcg |
| 1501 | atgagccccg gcacccccgg accgaccatg ggcagatccc agggcagccc aatggatcca |
| 1561 | atggtgatga agagacctca gttgtatggc atgggcagta accctcattc tcagcctcag |
| 1621 | cagagcagtc cgtacccagg aggttcctat ggccctccag gcccacagcg gtatccaatt |
| 1681 | ggcatccagg gtcggactcc cggggccatg gccggaatgc agtaccctca gcagcagatg |
| 1741 | ccacctcagt atggacagca aggtgtgagt ggttactgcc agcagggcca acagccatat |
| 1801 | tacagccagc agccgcagcc cccgcacctc ccaccccagg cgcagtatct gccgtcccag |
| 1861 | tcccagcaga ggtaccagcc gcagcaggac atgtctcagg aaggctatgg aactagatct |
| 1921 | caacctcctc tggcccccgg aaaacctaac catgaagact tgaacttaat acagcaagaa |
| 1981 | agaccatcaa gtttaccaga tctgtctggc tccattgatg acctccccac gggaacggaa |
| 2041 | gcaactttga gctcagcagt cagtgcatcc gggtccacga gcagccaagg ggatcagagc |
| 2101 | aacccggcgc agtcgccttt ctccccacat gcgtcccctc atctctccag catcccgggg |
| 2161 | ggcccatctc cctctcctgt tggctctcct gtaggaagca accagtctcg atctggccca |
| 2221 | atctctcctg caagtatccc aggtagtcag atgcctccgc agccacccgg gagccagtca |
| 2281 | gaatccagtt cccatcccgc cttgagccag tcaccaatgc cacaggaaag aggttttatg |
| 2341 | gcaggcacac aaagaaaccc tcagatggct cagtatggac ctcaacagac aggaccatcc |
| 2401 | atgtcgcctc atccttctcc tgggggccag atgcatgctg gaatcagtag ctttcagcag |
| 2461 | agtaactcaa gtgggactta cggtccacag atgagccagt atggaccaca aggtaactac |
| 2521 | tccagacccc cagcgtatag tggggtgccc agtgcaagct acagcggccc agggcccggt |
| 2581 | atgggtatca gtgccaacaa ccagatgcat ggacaagggc caagccagcc atgtggtgct |
| 2641 | gtgcccctgg gacgaatgcc atcagctggg atgcagaaca gaccatttcc tggaaatatg |
| 2701 | agcagcatga cccccagttc tcctggcatg tctcagcagg gagggccagg aatggggccg |
| 2761 | ccaatgccaa ctgtgaaccg taaggcacag gaggcagccg cagcagtgat gcaggctgct |
| 2821 | gcgaactcag cacaaagcag gcaaggcagt ttccccggca tgaaccagag tggacttatg |
| 2881 | gcttccagct ctccctacag ccagcccatg aacaacagct ctagcctgat gaacacgcag |
| 2941 | gcgccgccct acagcatggc gcccgccatg gtgaacagct cggcagcatc tgtgggtctt |
| 3001 | gcagatatga tgtctcctgg tgaatccaaa ctgcccctgc ctctcaaagc agacggcaaa |
| 3061 | gaagaaggca ctccacagcc cgagagcaag tcaaagaagt ccagctcctc caccactact |
| 3121 | ggggagaaga tcacgaaggt gtacgagctg gggaatgagc cagagagaaa gctctgggtc |
| 3181 | gaccgatacc tcaccttcat ggaagagaga ggctctcctg tctcaagtct gcctgccgtg |
| 3241 | ggcaagaagc ccctggacct gttccgactc tacgtctgcg tcaaagagat cgggggtttg |
| 3301 | gcccaggtta ataaaaacaa gaagtggcgt gagctggcaa ccaacctaaa cgttggcacc |
| 3361 | tcaagcagtg cagcgagctc cctgaaaaag cagtatattc agtacctgtt tgcctttgag |
| 3421 | tgcaagatcg aacgtgggga ggagcccccg ccggaagtct tcagcaccgg ggacaccaaa |
| 3481 | aagcagccca agctccagcc gccatctcct gctaactcgg gatccttgca aggcccacag |
| 3541 | accccccagt caactggcag caattccatg gcagaggttc caggtgacct gaagccacct |
| 3601 | accccagcct ccacccctca cggccagatg actccaatgc aaggtggaag aagcagtaca |
| 3661 | atcagtgtgc acgacccatt ctcagatgtg agtgattcat ccttcccgaa acggaactcc |
| 3721 | atgactccaa acgcccccta ccagcagggc atgagcatgc ccgatgtgat gggcaggatg |
| 3781 | ccctatgagc ccaacaagga cccctttggg ggaatgagaa aagtgcctgg aagcagcgag |
| 3841 | ccctttatga cgcaaggaca gatgcccaac agcagcatgc aggacatgta caaccaaagt |
| 3901 | ccctccggag caatgtctaa cctgggcatg gggcagcgcc agcagtttcc ctatggagcc |
| 3961 | agttacgacc gaaggcatga accttatggg cagcagtatc caggccaagg ccctccctcg |
| 4021 | ggacagccgc cgtatggagg gcaccagccc ggcctgtacc cacagcagcc gaattacaaa |
| 4081 | cgccatatgg acggcatgta cgggccccca gccaagcgcc acgagggcga catgtacaac |
| 4141 | atgcagtaca gcagccagca gcaggagatg tacaaccagt atggaggctc ctactcgggc |
| 4201 | ccggaccgca ggcccatcca gggccagtac ccgtatccct acagcaggga gaggatgcag |
| 4261 | ggcccggggc agatccagac acacggaatc ccgcctcaga tgatgggcgg cccgctgcag |
| 4321 | tcgtcctcca gtgaggggcc tcagcagaat atgtgggcag cacgcaatga tatgccttat |
| 4381 | ccctaccaga acaggcaggg ccctggcggc cctacacagg cgccccctta cccaggcatg |
| 4441 | aaccgcacag acgatatgat ggtacccgat cagaggataa atcatgagag ccagtggcct |
| 4501 | tctcacgtca gccagcgtca gccttatatg tcgtcctcag cctccatgca gcccatcaca |
| 4561 | cgcccaccac agccgtccta ccagacgcca ccgtcactgc caaatcacat ctccagggcg |
| 4621 | cccagcccag cgtccttcca gcgctccctg gagaaccgca tgtctccaag caagtctcct |
| 4681 | tttctgccgt ctatgaagat gcagaaggtc atgcccacgg tccccacatc ccaggtcacc |
| 4741 | gggccaccac cccaaccacc cccaatcaga agggagatca cctttcctcc tggctcagta |
| 4801 | gaagcatcac aaccagtctt gaaacaaagg cgaaagatta cctccaaaga tatcgttact |
| 4861 | cctgaggcgt ggcgtgtgat gatgtccctt aaatcaggtc ttttggctga gagtacgtgg |
| 4921 | gctttggaca ctattaatat tcttctgtat gatgacagca ctgttgctac tttcaatctc |
| 4981 | tcccagttgt ctggatttct cgaactttta gtcgagtact ttagaaaatg cctgattgac |
| 5041 | atttttggaa ttcttatgga atatgaagtg ggagacccca gccaaaaagc acttgatcac |
| 5101 | aacgcagcaa ggaaggatga cagccagtcc ttggcagacg attctgggaa agaggaggaa |
| 5161 | gatgctgaat gtattgatga cgacgaggaa gacgaggagg atgaggagga agacagcgag |
| 5221 | aagacagaaa gcgatgaaaa gagcagcatc gctctgactg ccccggacgc cgctgcagac |
| 5281 | ccaaaggaga agcccaagca agccagtaag ttcgacaagc tgccaataaa gatagtcaaa |
| 5341 | aagaacaacc tgtttgttgt tgaccgatct gacaagttgg ggcgtgtgca ggagttcaat |
| 5401 | agtggccttc tgcactggca gctcggcggg ggtgacacca ccgagcacat tcagactcac |
| 5461 | tttgagagca agatggaaat tcctcctcgc aggcgcccac ctcccccctt aagctccgca |
| 5521 | ggtagaaaga aagagcaaga aggcaaaggc gactctgaag agcagcaaga gaaaagcatc |
| 5581 | atagcaacca tcgatgacgt cctctctgct cggccagggg cattgcctga agacgcaaac |
| 5641 | cctgggcccc agaccgaaag cagtaagttt ccctttggta tccagcaagc caaaagtcac |
| 5701 | cggaacatca agctgctgga ggacgagccc aggagccgag acgagactcc tctgtgtacc |
| 5761 | atcgcgcact ggcaggactc gctggctaag cgatgcatct gtgtgtccaa tattgtccgt |
| 5821 | agcttgtcat tcgtgcctgg caatgatgcc gaaatgtcca aacatccagg cctggtgctg |
| 5881 | atcctgggga agctgattct tcttcaccac gagcatccag agagaaagcg agcaccgcag |
| 5941 | acctatgaga aagaggagga tgaggacaag ggggtggcct gcagcaaaga tgagtggtgg |
| 6001 | tgggactgcc tcgaggtctt gagggataac acgttggtca cgttggccaa catttccggg |
| 6061 | cagctagact tgtctgctta cacggaaagc atctgcttgc caattttgga tggcttgctg |
| 6121 | cactggatgg tgtgcccgtc tgcagaggca caagatccct ttccaactgt gggacccaac |
| 6181 | tcggtcctgt cgcctcagag acttgtgctg gagaccctct gtaaactcag tatccaggac |
| 6241 | aataatgtgg acctgatctt ggccactcct ccatttagtc gtcaggagaa attctatgct |
| 6301 | acattagtta ggtacgttgg ggatcgcaaa aacccagtct gtcgagaaat gtccatggcg |
| 6361 | cttttatcga accttgccca aggggacgca ctagcagcaa gggccatagc tgtgcagaaa |
| 6421 | ggaagcattg gaaacttgat aagcttccta gaggatgggg tcacgatggc ccagtaccag |
| 6481 | cagagccagc acaacctcat gcacatgcag cccccgcccc tggaaccacc tagcgtagac |
| 6541 | atgatgtgca gggcggccaa ggctttgcta gccatggcca gagtggacga aaaccgctcg |
| 6601 | gaattccttt tgcacgaggg ccggttgctg gatatctcga tatcagctgt cctgaactct |
| 6661 | ctggttgcat ctgtcatctg tgatgtactg tttcagattg ggcagttatg acataagtga |
| 6721 | gaaggcaagc atgtgtgagt gaagattaga gggtcacata taactggctg ttttctgttc |
| 6781 | ttgtttatcc agcgtaggaa gaaggaaaag aaaatctttg ctcctctgcc ccattcacta |
| 6841 | tttaccaatt gggaattaaa gaaataatta atttgaacag ttatgaaatt aatatttgct |
| 6901 | gtctgtgtgt ataagtacat cctttggggt tttttttttc tctttttttt aaccaaagtt |
| 6961 | gctgtctagt gcattcaaag gtcacttttt gttcttcaca gatcttttta atgttctttc |
| 7021 | ccatgttgta ttgcattttt gggggaagca aattgacttt aaagaaaaaa gttgtggcaa |
| 7081 | aagatgctaa gatgcgaaaa tttcaccaca ctgagtcaaa aaggtgaaaa attatccatt |
| 7141 | tcctatgcgt tttactcctc agagaatgaa aaaaactgca tcccatcacc caaagttctg |
| 7201 | tgcaatagaa atttctacag atacaggtat aggggctcaa ggaggtatgt cggtcagtag |
| 7261 | tcaaaactat gaaatgatac tggtttctcc acaggaatat ggttccatta ggctgggagc |
| 7321 | aaaaacaatg ttttttaaga ttgagaatac atacctgaca acgatccgga aactgctcct |
| 7381 | caccactccc gtcatgcctg ctgtcggcgt ttgaccttcc acgtgacagt tcttcacaat |
| 7441 | tcctttcatc attttttaaa tatttttttt actgcctatg ggctgtgatg tatatagaag |
| 7501 | ttgtacatta aacataccct catttttttc ttttcttttt tttttttttt tttagtacaa |
| 7561 | agttttagtt tctttttcat gatgtggtaa ctacgaagtg atggtagatt taaataattt |
| 7621 | tttattttta ttttatatat tttttcatta gggccatatc tccaaaaaaa gaaagaaaaa |
| 7681 | atacaaaaaa caaaaacaaa aaaaaaagag ggtaatgtac aagtttctgt atgtataaag |
| 7741 | tcatgctcga tttcaggaga gcagctgatc acaatttgct tcatgaatca aggtgtggaa |
| 7801 | atggttatat atggattgat ttagaaaatg gttaccagta cagtcaaaaa agagaaaatg |
| 7861 | aaaaaaatac aactaaaagg aagaaacaca acttcaaaga tttttcagtg atgagaatcc |
| 7921 | acatttgtat ttcaagataa tgtagtttaa aaaaaaaaaa aagaaaaaaa cttgatgtaa |
| 7981 | attcctcctt ttcctctggc ttaatgaata tcatttattc agtataaaat ctttatatgt |
| 8041 | tccacatgtt aagaataaat gtacattaaa tcttgttaag cactgtgatg ggtgttcttg |
| 8101 | aatactgttc tagtttcctt aaagtggttt cctagtaatc aagttattta caagaaatag |
| 8161 | gggaatgcag cagtgtattc acattataaa accctacatt tggaagagac ctttaggggt |
| 8221 | tacctacttt agagtgggga gcaacagttt gattttctca aattacttag ctaattagtc |
| 8281 | tttctttgaa gcaattaact ctaacgacat tgaggtatga tcattttcag tatttatggg |
| 8341 | aggtggctgc tgacccactt gaggtgagat ctcagaagct taactggcct gaaaatgtaa |
| 8401 | cattctgcct tttactaact ccatcttagt ttaatcaaag ttcaatctat tccttgtttc |
| 8461 | ttctgtgtgc ctcagagtta ttttgcattt agtttactcc accgtgtata atatttatac |
| 8521 | tgtgcaatgt taaaaaagaa tctgttatat tgtatgtggt gtacatagtg caaagtgatg |
| 8581 | atttctattt cagggcatat tatggttctc atattccttc ctacctggtg cacagtagct |
| 8641 | ttttaatact agtcacttct aatttaaact ttctcttcct gggtcattga ctgttactgt |
| 8701 | gtaataatcg atttctttga aactgctgca taattatgct gttagtggac ctctacctct |
| 8761 | tctcttccct ctcccaatca cagtatactc agaatcccca gcccctcgca tacattgtgt |
| 8821 | cggttcacat tactcacagt aatatatgga agagttagac aagaacatgc agttacagtc |
| 8881 | attgtgagac gtgactctcc agtgtcacga ggaaaaaaat catcttttct gcaaacagtc |
| 8941 | tctcatctgt caactcccac attactgagt caaacagtct tcttacataa caatgcaacc |
| 9001 | aaatatatgt tgaattaaag acccatttat aattctgctt taaatacatc tgcttgctaa |
| 9061 | gaacagattt cagtgctcca agcttcaaat atggagattt gtaagaggga attcaatatt |
| 9121 | attctaattt ctctcttaca gagtacaaat aaaaggtgta tacaaactcc gaacatatcc |
| 9181 | agtattccaa ttcctttgtc aatcagaaga gtaaaataat taacaaaaga ctgttgttat |
| 9241 | ggtttgcatt gtaaccgata cgcagagtct gaccgttggg caacaagttt ttctatcctg |
| 9301 | atgcgcaaca cagtctctag agactaatcc aggaagactt tagcctcctt tccatattct |
| 9361 | cacccccgaa tcaagattta cagaagccca cgaagaattt acagcctgct tgagatcatc |
| 9421 | ttgcctataa actgagttat tgctttgtcc taaaaattag tcggtttttt tttttctatg |
| 9481 | aggcttttca gaaatttaca ggatgcccag actttacatg tgtaccaaaa aaaaaaaaaa |
| 9541 | gataaaaaat aaaggtgcaa agaaagttta gtattttgga atggtgctat aaagttgaaa |
| 9601 | aaaaaaaaa |

SEQ ID NO: 53 Human ARID1B Amino Acid Sequence isoform A (NP_059989.2)

| | |
|---|---|
| 1 | mahnagaaaa agthsaksgg seaalkeggs aaalssssss saaaaaasss sssgpgsame |
| 61 | tgllpnhklk tvgeapaapp hqqhhhhhha hhhhhhahhl hhhhalqqql ngfqqqqqqq |
| 121 | qqqqqqqqqq qhpisnnnsl ggagggapqp gpdmeqpqhg gakdsaaggq adppgpplls |
| 181 | kpgdeddapp kmgepaggry ehpglgalgt qqppvavpgg gggpaavpef nnyygsaapa |
| 241 | sggpggragp cfdqhggqqs pgmgmmhsas aaaagapgsm dplqnshegy pnsqcnhypg |
| 301 | ysrpgagggg gggggggggs ggggggggag aggagagava aaaaaaaaaa gggggggygg |
| 361 | ssagygvlss prqqgggmmm gpggggaasl skaaagsaag gfqrfagqnq hpsgatptln |
| 421 | qlltspspmm rsyggsypey sspsappppp sqpqsqaaaa gaaaggqqaa agmglgkdmg |
| 481 | aqyaaaspaw aaaqqrshpa mspgtpgptm grsqgspmdp mvmkrpqlyg mgsnphsqpq |
| 541 | qsspypggsy gppgpqrypi giqgrtpgam agmqypqqqm ppqygqqgvs gycqqgqqpy |
| 601 | ysqqpqpphl ppqaqylpsq sqqryqpqqd msqegygtrs qpplapgkpn hedlnliqqe |
| 661 | rpsslpdlsg siddlptgte atlssavsas gstssqgdqs npaqspfsph asphlssipg |
| 721 | gpspspvgsp vgsnqsrsgp ispasipgsq mppqppgsqs essshpalsq spmpqergfm |
| 781 | agtqrnpqma qygpqqtgps msphpspggq mhagissfqq snssgtygpq msqygpqgny |
| 841 | srppaysgvp sasysgpgpg mgisannqmh gqgpsqpcga vplgrmpsag mqnrpfpgnm |
| 901 | ssmtpsspgm sqqggpgmgp pmptvnrkaq eaaaavmqaa ansaqsrqgs fpgmnqsglm |
| 961 | assspysqpm nnssslmntq appysmapam vnssaasvgl admmspgesk lplplkadgk |
| 1021 | eegtpqpesk skkssssttt gekitkvyel gneperklwv dryltfmeer gspvsslpav |
| 1081 | gkkpldlfrl yvcvkeiggl aqvnknkkwr elatnlnvgt sssaasslkk qyiqylfafe |
| 1141 | ckiergeepp pevfstgdtk kqpklqppsp ansgslqgpq tpqstgsnsm aevpgdlkpp |
| 1201 | tpastphgqm tpmqggrsst isvhdpfsdv sdssfpkrns mtpnapyqqg msmpdvmgrm |
| 1261 | pyepnkdpfg gmrkvpgsse pfmtqgqmpn ssmqdmynqs psgamsnlgm gqrqqfpyga |
| 1321 | sydrrhepyg qqypgqgpps gqppygghqp glypqqpnyk rhmdgmygpp akrhegdmyn |
| 1381 | mqyssqqqem ynqyggsysg pdrrpiqgqy pypysrermq gpgqiqthgi ppqmmggplq |
| 1441 | ssssegpqqn mwaarndmpy pygnrqgpgg ptqappypgm nrtddmmvpd qrinhesqwp |
| 1501 | shvsqrqpym sssasmqpit rppqpsyqtp pslpnhisra pspasfqrsl enrmspsksp |
| 1561 | flpsmkmqkv mptvptsqvt gpppqpppir reitfppgsv easqpvlkqr rkitskdivt |
| 1621 | peawrvmmsl ksgllaestw aldtinilly ddstvatfnl sqlsgflell veyfrkclid |
| 1681 | ifgilmeyev gdpsqkaldh naarkddsqs laddsgkeee daecidddee deedeeedse |
| 1741 | ktesdekssi altapdaaad pkekpkqask fdklpikivk knnlfvvdrs dklgrvqefn |
| 1801 | sgllhwqlgg gdttehiqth feskmeippr rrpppplssa grkkeqegkg dseeqqeksi |
| 1861 | iatiddvlsa rpgalpedan pgpqtesskf pfgiqqaksh rniklledep rsrdetplct |
| 1921 | iahwqdslak rcicvsnivr slsfvpgnda emskhpglvl ilgklillhh ehperkrapq |
| 1981 | tyekeededk gvacskdeww wdclevlrdn tlvtlanisg qldlsaytes iclpildgll |
| 2041 | hwmvcpsaea qdpfptvgpn svlspqrlvl etlcklsiqd nnvdlilatp pfsrqekfya |
| 2101 | tlvryvgdrk npvcremsma llsnlaqgda laaraiavqk gsignlisfl edgvtmaqyq |
| 2161 | qsqhnlmhmq pppleppsvd mmcraakall amarvdenrs efllhegrll disisavIns |
| 2221 | lvasvicdvl fqigql |

SEQ ID NO: 54 Human ARID1B cDNA Sequence Variant 2 (NM_020732.3, CDS:
from 1 to 6750)

| | |
|---|---|
| 1 | atggcccata acgcgggcgc cgcggccgcc gccggcaccc acagcgccaa gagcggcggc |
| 61 | tccgaggcgg ctctcaagga gggtggaagc gccgccgcgc tgtcctcctc ctcctcctcc |
| 121 | tccgcggcgg cagcggcggc atcctcttcc tcctcgtcgg gcccgggctc ggccatggag |
| 181 | acggggctgc tccccaacca caaactgaaa accgttggcg aagcccccgc cgcgccgccc |
| 241 | caccagcagc accaccacca ccaccatgcc caccaccacc accaccatgc ccaccacctc |
| 301 | caccaccacc acgcactaca gcagcagcta aaccagttcc agcagcagca gcagcagcag |
| 361 | caacagcagc agcagcagca gcagcaacag caacatccca tttccaacaa caacagcttg |
| 421 | ggcggcgcgg gcggcggcgc gcctcagccc ggccccgaca tggagcagcc gcaacatgga |
| 481 | ggcgccaagg acagtgctgc gggcggccag gccgaccccc cgggcccgcc gctgctgagc |
| 541 | aagccgggcg acgaggacga cgcgccgccc aagatggggg agccggcggg cggccgctac |
| 601 | gagcacccgg gcttgggcgc cctgggcacg cagcagccgc cggtcgccgt gcccgggggc |
| 661 | ggcggcggcc cggcggccgt cccggagttt aataattact atggcagcgc tgcccctgcg |
| 721 | agcggcggcc ccggcggccg cgctgggcct tgctttgatc aacatggcgg acaacaaagc |
| 781 | cccgggatgg ggatgatgca ctccgcctcc gccgccgccg ccggggcccc cggcagcatg |
| 841 | gaccccctgc agaactccca cgaagggtac cccaacagcc agtgcaacca ttatccgggc |
| 901 | tacagccggc ccggcgcggg cggcggcggc ggcggcggcg gcggaggagg aggaggcagc |
| 961 | ggaggaggag gaggaggagg aggagcagga gcaggaggag caggagcggg agctgtggcg |
| 1021 | gcggcggccg cggcggcggc ggcagcagca ggaggcggcg gcggcggcgg ctatgggggc |
| 1081 | tcgtccgcgg ggtacggggt gctgagctcc ccccggcagc agggcggcgg catgatgatg |
| 1141 | ggccccgggg gcggcggggc cgcgagcctc agcaaggcgg ccgccggctc ggcggcgggg |
| 1201 | ggcttccagc gcttcgccgg ccagaaccag cacccgtcgg gggccacccc gaccctcaat |
| 1261 | cagctgctca cctcgcccag ccccatgatg cggagctacg gcggcagcta ccccgagtac |
| 1321 | agcagcccca gcgcgccgcc gccgccgccg tcgcagcccc agtcccaggc ggcggcggcg |
| 1381 | ggggcggcgg cgggcggcca gcaggcggcc gcgggcatgg gcttgggcaa ggacatgggc |
| 1441 | gcccagtacg ccgctgccag cccggcctgg gcggccgcgc aacaaaggag tcacccggcg |
| 1501 | atgagccccg gcacccccgg accgaccatg ggcagatccc agggcagccc aatggatcca |
| 1561 | atggtgatga agagacctca gttgtatggc atgggcagta accctcattc tcagcctcag |
| 1621 | cagagcagtc cgtacccagg aggttcctat ggccctccag gcccacagcg gtatccaatt |
| 1681 | ggcatccagg gtcggactcc cggggccatg gccggaatgc agtaccctca gcagcaggac |
| 1741 | tctggagatg ccacatggaa agaaacattc tggttgatgc cacctcagta tggacagcaa |
| 1801 | ggtgtgagtg gttactgcca gcagggccaa cagccatatt acagccagca gccgcagccc |
| 1861 | ccgcacctcc caccccaggc gcagtatctg ccgtcccagt cccagcagag gtaccagccg |
| 1921 | cagcaggaca tgtctcagga aggctatgga actagatctc aacctcctct ggcccccgga |
| 1981 | aaacctaacc atgaagactt gaacttaata cagcaagaaa gaccatcaag tttaccagat |
| 2041 | ctgtctggct ccattgatga cctccccacg ggaacggaag caactttgag ctcagcagtc |
| 2101 | agtgcatccg ggtccacgag cagccaaggg gatcagagca acccggcgca gtcgcctttc |
| 2161 | tccccacatg cgtcccctca tctctccagc atcccggggg gcccatctcc ctctcctgtt |
| 2221 | ggctctcctg taggaagcaa ccagtctcga tctggcccaa tctctcctgc aagtatccca |
| 2281 | ggtagtcaga tgcctccgca gccacccggg agccagtcag aatccagttc ccatcccgcc |
| 2341 | ttgagccagt caccaatgcc acaggaaaga ggttttatgg caggcacaca aagaaaccct |
| 2401 | cagatggctc agtatggacc tcaacagaca ggaccatcca tgtcgcctca tccttctcct |
| 2461 | gggggccaga tgcatgctgg aatcagtagc tttcagcaga gtaactcaag tgggacttac |
| 2521 | ggtccacaga tgagccagta tggaccacaa ggtaactact ccagaccccc agcgtatagt |
| 2581 | ggggtgccca gtgcaagcta cagcggccca gggcccggta tgggtatcag tgccaacaac |
| 2641 | cagatgcatg gacaagggcc aagccagcca tgtggtgctg tgcccctggg acgaatgcca |
| 2701 | tcagctggga tgcagaacag accatttcct ggaaatatga gcagcatgac ccccagttct |
| 2761 | cctggcatgt ctcagcaggg agggccagga atggggccgc caatgccaac tgtgaaccgt |
| 2821 | aaggcacagg aggcagccgc agcagtgatg caggctgctg cgaactcagc acaaagcagg |
| 2881 | caaggcagtt tccccggcat gaaccagagt ggacttatgg cttccagctc tccctacagc |
| 2941 | cagcccatga acaacagctc tagcctgatg aacacgcagg cgccgcccta cagcatggcg |
| 3001 | cccgccatgg tgaacagctc ggcagcatct gtgggtcttg cagatatgat gtctcctggt |
| 3061 | gaatccaaac tgcccctgcc tctcaaagca gacggcaaag aagaaggcac tccacagccc |
| 3121 | gagagcaagt caaagaagtc cagctcctcc accactactg gggagaagat cacgaaggtg |
| 3181 | tacgagctgg ggaatgagcc agagagaaag ctctgggtcg accgatacct caccttcatg |
| 3241 | gaagagagag gctctcctgt ctcaagtctg cctgccgtgg gcaagaagcc cctggacctg |
| 3301 | ttccgactct acgtctgcgt caaagagatc gggggtttgg cccaggttaa taaaaacaag |
| 3361 | aagtggcgtg agctggcaac caacctaaac gttggcacct caagcagtgc agcgagctcc |
| 3421 | ctgaaaaagc agtatattca gtacctgttt gcctttgagt gcaagatcga acgtggggag |
| 3481 | gagcccccgc cggaagtctt cagcaccggg gacaccaaaa agcagcccaa gctccagccg |
| 3541 | ccatctcctg ctaactcggg atccttgcaa ggcccacaga ccccccagtc aactggcagc |
| 3601 | aattccatgg cagaggttcc aggtgacctg aagccaccta ccccagcctc cacccctcac |
| 3661 | ggccagatga ctccaatgca aggtggaaga agcagtacaa tcagtgtgca cgacccattc |
| 3721 | tcagatgtga gtgattcatc cttcccgaaa cggaactcca tgactccaaa cgccccctac |
| 3781 | cagcagggca tgagcatgcc cgatgtgatg ggcaggatgc cctatgagcc caacaaggac |
| 3841 | ccctttgggg gaatgagaaa agtgcctgga agcagcgagc cctttatgac gcaaggacag |
| 3901 | atgcccaaca gcagcatgca ggacatgtac aaccaaagtc cctccggagc aatgtctaac |
| 3961 | ctgggcatgg ggcagcgcca gcagtttccc tatggagcca gttacgaccg aaggcatgaa |
| 4021 | ccttatgggc agcagtatcc aggccaaggc cctccctcgg gacagccgcc gtatggaggg |
| 4081 | caccagcccg gcctgtaccc acagcagccg aattacaaac gccatatgga cggcatgtac |
| 4141 | gggcccccag ccaagcgcca cgagggcgac atgtacaaca tgcagtacag cagccagcag |
| 4201 | caggagatgt acaaccagta tggaggctcc tactcgggcc cggaccgcag gcccatccag |
| 4261 | ggccagtacc cgtatcccta cagcagggag aggatgcagg gcccggggca gatccagaca |
| 4321 | cacggaatcc cgcctcagat gatgggcggc ccgctgcagt cgtcctccag tgaggggcct |
| 4381 | cagcagaata tgtgggcagc acgcaatgat atgccttatc cctaccagaa caggcagggc |
| 4441 | cctggcggcc ctacacaggc gcccccttac ccaggcatga accgcacaga cgatatgatg |
| 4501 | gtacccgatc agaggataaa tcatgagagc cagtggcctt ctcacgtcag ccagcgtcag |
| 4561 | ccttatatgt cgtcctcagc ctccatgcag cccatcacac gcccaccaca gccgtcctac |
| 4621 | cagacgccac cgtcactgcc aaatcacatc tccagggcgc ccagcccagc gtccttccag |
| 4681 | cgctccctgg agaaccgcat gtctccaagc aagtctcctt ttctgccgtc tatgaagatg |
| 4741 | cagaaggtca tgcccacggt ccccacatcc caggtcaccg ggccaccacc ccaaccaccc |
| 4801 | ccaatcagaa gggagatcac ctttcctcct ggctcagtag aagcatcaca accagtcttg |
| 4861 | aaacaaaggc gaaagattac ctccaaagat atcgttactc ctgaggcgtg gcgtgtgatg |
| 4921 | atgtccctta aatcaggtct tttggctgag agtacgtggg ctttggacac tattaatatt |
| 4981 | cttctgtatg atgacagcac tgttgctact ttcaatctct cccagttgtc tggatttctc |
| 5041 | gaacttttag tcgagtactt tagaaaatgc ctgattgaca tttttggaat tcttatggaa |
| 5101 | tatgaagtgg gagaccccag ccaaaaagca cttgatcaca acgcagcaag gaaggatgac |
| 5161 | agccagtcct tggcagacga ttctgggaaa gaggaggaag atgctgaatg tattgatgac |
| 5221 | gacgaggaag acgaggagga tgaggaggaa gacagcgaga agacagaaag cgatgaaaag |
| 5281 | agcagcatcg ctctgactgc cccggacgcc gctgcagacc caaaggagaa gcccaagcaa |
| 5341 | gccagtaagt tcgacaagct gccaataaag atagtcaaaa agaacaacct gtttgttgtt |
| 5401 | gaccgatctg acaagttggg gcgtgtgcag gagttcaata gtggccttct gcactggcag |
| 5461 | ctcggcgggg gtgacaccac cgagcacatt cagactcact ttgagagcaa gatggaaatt |
| 5521 | cctcctcgca ggcgcccacc tcccccctta agctccgcag gtagaaagaa agagcaagaa |
| 5581 | ggcaaaggcg actctgaaga gcagcaagag aaaagcatca tagcaaccat cgatgacgtc |
| 5641 | ctctctgctc ggccaggggc attgcctgaa gacgcaaacc ctgggcccca gaccgaaagc |
| 5701 | agtaagtttc cctttggtat ccagcaagcc aaaagtcacc ggaacatcaa gctgctggag |
| 5761 | gacgagccca ggagccgaga cgagactcct ctgtgtacca tcgcgcactg gcaggactcg |
| 5821 | ctggctaagc gatgcatctg tgtgtccaat attgtccgta gcttgtcatt cgtgcctggc |
| 5881 | aatgatgccg aaatgtccaa acatccaggc ctggtgctga tcctggggaa gctgattctt |
| 5941 | cttcaccacg agcatccaga gagaaagcga gcaccgcaga cctatgagaa agaggaggat |
| 6001 | gaggacaagg gggtggcctg cagcaaagat gagtggtggt gggactgcct cgaggtcttg |
| 6061 | agggataaca cgttggtcac gttggccaac atttccgggc agctagactt gtctgcttac |
| 6121 | acggaaagca tctgcttgcc aattttggat ggcttgctgc actggatggt gtgcccgtct |
| 6181 | gcagaggcac aagatccctt tccaactgtg ggacccaact cggtcctgtc gcctcagaga |
| 6241 | cttgtgctgg agaccctctg taaactcagt atccaggaca ataatgtgga cctgatcttg |
| 6301 | gccactcctc catttagtcg tcaggagaaa ttctatgcta cattagttag gtacgttggg |
| 6361 | gatcgcaaaa acccagtctg tcgagaaatg tccatggcgc ttttatcgaa ccttgcccaa |
| 6421 | ggggacgcac tagcagcaag ggccatagct gtgcagaaag gaagcattgg aaacttgata |
| 6481 | agcttcctag aggatggggt cacgatggcc cagtaccagc agagccagca caacctcatg |
| 6541 | cacatgcagc ccccgcccct ggaaccacct agcgtagaca tgatgtgcag ggcggccaag |
| 6601 | gctttgctag ccatggccag agtggacgaa aaccgctcgg aattcctttt gcacgagggc |
| 6661 | cggttgctgg atatctcgat atcagctgtc ctgaactctc tggttgcatc tgtcatctgt |
| 6721 | gatgtactgt ttcagattgg gcagttatga cataagtgag aaggcaagca tgtgtgagtg |
| 6781 | aagattagag ggtcacatat aactggctgt tttctgttct tgtttatcca gcgtaggaag |
| 6841 | aaggaaaaga aaatctttgc tcctctgccc cattcactat ttaccaattg ggaattaaag |
| 6901 | aaataattaa tttgaacagt tatgaaatta atatttgctg tctgtgtgta taagtacatc |
| 6961 | ctttggggtt ttttttttct ctttttttta accaaagttg ctgtctagtg cattcaaagg |
| 7021 | tcactttttg ttcttcacag atctttttaa tgttctttcc catgttgtat tgcatttttg |
| 7081 | ggggaagcaa attgacttta aagaaaaaag ttgtggcaaa agatgctaag atgcgaaaat |
| 7141 | ttcaccacac tgagtcaaaa aggtgaaaaa ttatccattt cctatgcgtt ttactcctca |
| 7201 | gagaatgaaa aaaactgcat cccatcaccc aaagttctgt gcaatagaaa tttctacaga |
| 7261 | tacaggtata ggggctcaag gaggtatgtc ggtcagtagt caaaactatg aaatgatact |
| 7321 | ggtttctcca caggaatatg gttccattag gctgggagca aaaacaatgt tttttaagat |
| 7381 | tgagaataca tacctgacaa cgatccggaa actgctcctc accactcccg tcatgcctgc |
| 7441 | tgtcggcgtt tgaccttcca cgtgacagtt cttcacaatt cctttcatca ttttttaaat |
| 7501 | atttttttta ctgcctatgg gctgtgatgt atatagaagt tgtacattaa acataccctc |
| 7561 | atttttttct tttctttttt tttttttttt ttagtacaaa gttttagttt ctttttcatg |
| 7621 | atgtggtaac tacgaagtga tggtagattt aaataatttt ttatttttat tttatatatt |
| 7681 | ttttcattag ggccatatct ccaaaaaaag aaagaaaaaa tacaaaaaac aaaaacaaaa |
| 7741 | aaaaaagagg gtaatgtaca agtttctgta tgtataaagt catgctcgat ttcaggagag |
| 7801 | cagctgatca caatttgctt catgaatcaa ggtgtggaaa tggttatata tggattgatt |
| 7861 | tagaaaatgg ttaccagtac agtcaaaaaa gagaaaatga aaaaaataca actaaaagga |
| 7921 | agaaacacaa cttcaaagat ttttcagtga tgagaatcca catttgtatt tcaagataat |
| 7981 | gtagtttaaa aaaaaaaaaa agaaaaaaac ttgatgtaaa ttcctccttt tcctctggct |
| 8041 | taatgaatat catttattca gtataaaatc tttatatgtt ccacatgtta agaataaatg |
| 8101 | tacattaaat cttgttaagc actgtgatgg gtgttcttga atactgttct agtttcctta |
| 8161 | aagtggtttc ctagtaatca agttatttac aagaaatagg ggaatgcagc agtgtattca |
| 8221 | cattataaaa ccctacattt ggaagagacc tttaggggtt acctacttta gagtggggag |
| 8281 | caacagtttg attttctcaa attacttagc taattagtct ttctttgaag caattaactc |
| 8341 | taacgacatt gaggtatgat cattttcagt atttatggga ggtggctgct gacccacttg |
| 8401 | aggtgagatc tcagaagctt aactggcctg aaaatgtaac attctgcctt ttactaactc |
| 8461 | catcttagtt taatcaaagt tcaatctatt ccttgtttct tctgtgtgcc tcagagttat |
| 8521 | tttgcattta gtttactcca ccgtgtataa tatttatact gtgcaatgtt aaaaaagaat |
| 8581 | ctgttatatt gtatgtggtg tacatagtgc aaagtgatga tttctatttc agggcatatt |
| 8641 | atggttctca tattccttcc tacctggtgc acagtagctt tttaatacta gtcacttcta |
| 8701 | atttaaactt tctcttcctg ggtcattgac tgttactgtg taataatcga tttctttgaa |
| 8761 | actgctgcat aattatgctg ttagtggacc tctacctctt ctcttccctc tcccaatcac |
| 8821 | agtatactca gaatccccag cccctcgcat acattgtgtc ggttcacatt actcacagta |
| 8881 | atatatggaa gagttagaca agaacatgca gttacagtca ttgtgagacg tgactctcca |
| 8941 | gtgtcacgag gaaaaaaatc atcttttctg caaacagtct ctcatctgtc aactcccaca |
| 9001 | ttactgagtc aaacagtctt cttacataac aatgcaacca aatatatgtt gaattaaaga |
| 9061 | cccatttata attctgcttt aaatacatct gcttgctaag aacagatttc agtgctccaa |
| 9121 | gcttcaaata tggagatttg taagagggaa ttcaatatta ttctaatttc tctcttacag |
| 9181 | agtacaaata aaaggtgtat acaaactccg aacatatcca gtattccaat tcctttgtca |
| 9241 | atcagaagag taaaataatt aacaaaagac tgttgttatg gtttgcattg taaccgatac |
| 9301 | gcagagtctg accgttgggc aacaagtttt tctatcctga tgcgcaacac agtctctaga |
| 9361 | gactaatcca ggaagacttt agcctccttt ccatattctc acccccgaat caagatttac |
| 9421 | agaagcccac gaagaattta cagcctgctt gagatcatct tgcctataaa ctgagttatt |
| 9481 | gctttgtcct aaaaattagt cggttttttt ttttctatga ggcttttcag aaatttacag |
| 9541 | gatgcccaga ctttacatgt gtaccaaaaa aaaaaaaaag ataaaaaata aaggtgcaaa |
| 9601 | gaaagtttag tattttggaa tggtgctata aagttgaaaa aaaaaaaa |

SEQ ID NO: 55 Human ARID1B Amino Acid Sequence isoform B (NP_065783.3)

| | |
|---|---|
| 1 | mahnagaaaa agthsaksgg seaalkeggs aaalssssss saaaaaasss sssgpgsame |
| 61 | tgllpnhklk tvgeapaapp hqqhhhhhha hhhhhhahhl hhhhalqqql ngfqqqqqqq |
| 121 | qqqqqqqqqq qhpisnnnsl ggagggapqp gpdmeqpqhg gakdsaaggq adppgpplls |
| 181 | kpgdeddapp kmgepaggry ehpglgalgt qqppvavpgg gggpaavpef nnyygsaapa |
| 241 | sggpggragp cfdqhggqqs pgmgmmhsas aaaagapgsm dplqnshegy pnsqcnhypg |
| 301 | ysrpgagggg gggggggggs ggggggggag aggagagava aaaaaaaaaa gggggggygg |
| 361 | ssagygvlss prqqgggmmm gpggggaasl skaaagsaag gfqrfagqnq hpsgatptln |
| 421 | qlltspspmm rsyggsypey sspsappppp sqpqsqaaaa gaaaggqqaa agmglgkdmg |
| 481 | aqyaaaspaw aaaqqrshpa mspgtpgptm grsqgspmdp mvmkrpqlyg mgsnphsqpq |
| 541 | qsspypggsy gppgpqrypi giqgrtpgam agmqypqqqd sgdatwketf wlmppqygqq |
| 601 | gvsgycqqgq qpyysqqpqp phlppqaqyl psqsqqryqp qqdmsqegyg trsqpplapg |
| 661 | kpnhedlnli qqerpsslpd lsgsiddlpt gteatlssav sasgstssqg dqsnpaqspf |
| 721 | sphasphlss ipggpspspv gspvgsnqsr sgpispasip gsqmppqppg sqsessshpa |
| 781 | lsqspmpqer gfmagtqrnp qmagygpqqt gpsmsphpsp ggqmhagiss fqqsnssgty |
| 841 | gpqmsqygpq gnysrppays gvpsasysgp gpgmgisann qmhgqgpsqp cgavplgrmp |
| 901 | sagmqnrpfp gnmssmtpss pgmsqqggpg mgppmptvnr kaqeaaaavm qaaansaqsr |
| 961 | qgsfpgmnqs glmassspys qpmnnssslm ntqappysma pamvnssaas vgladmmspg |
| 1021 | esklplplka dgkeegtpqp eskskkssss tttgekitkv yelgneperk lwvdryltfm |
| 1081 | eergspvssl pavgkkpldl frlyvcvkei gglaqvnknk kwrelatnln vgtsssaass |
| 1141 | lkkqyiqylf afeckierge epppevfstg dtkkqpklqp pspansgslq gpqtpqstgs |
| 1201 | nsmaevpgdl kpptpastph gqmtpmqggr sstisvhdpf sdvsdssfpk rnsmtpnapy |
| 1261 | qqgmsmpdvm grmpyepnkd pfggmrkvpg ssepfmtqgq mpnssmqdmy nqspsgamsn |
| 1321 | 1gmgqrqqfp ygasydrrhe pygqqypgqg ppsgqppygg hqpglypqqp nykrhmdgmy |
| 1381 | gppakrhegd mynmqyssqq qemynqyggs ysgpdrrpiq gqypypysre rmqgpgqiqt |
| 1441 | hgippqmmgg plqssssegp qqnmwaarnd mpypyqnrqg pggptqappy pgmnrtddmm |
| 1501 | vpdqrinhes qwpshvsqrq pymsssasmq pitrppqpsy qtppslpnhi srapspasfq |
| 1561 | rslenrmsps kspflpsmkm qkvmptvpts qvtgpppqpp pirreitfpp gsveasqpvl |
| 1621 | kqrrkitskd ivtpeawrvm mslksgllae stwaldtini llyddstvat fnlsqlsgfl |
| 1681 | ellveyfrkc lidifgilme yevgdpsqka ldhnaarkdd sqsladdsgk eeedaecidd |
| 1741 | deedeedeee dsektesdek ssialtapda aadpkekpkq askfdklpik ivkknnlfvv |
| 1801 | drsdklgrvq efnsgllhwq lgggdttehi qthfeskmei pprrrppppl ssagrkkeqe |
| 1861 | gkgdseeqqe ksiiatiddv lsarpgalpe danpgpqtes skfpfgiqqa kshrniklle |
| 1921 | deprsrdetp lctiahwqds lakrcicvsn ivrslsfvpg ndaemskhpg lvlilgklil |
| 1981 | lhhehperkr apqtyekeed edkgvacskd ewwwdclevl rdntlvtlan isgqldlsay |
| 2041 | tesiclpild gllhwmvcps aeaqdpfptv gpnsvlspqr lvletlckls iqdnnvdlil |
| 2101 | atppfsrqek fyatlvryvg drknpvcrem smallsnlaq gdalaaraia vqkgsignli |
| 2161 | sfledgvtma qyqqsqhnlm hmqppplepp svdmmcraak allamarvde nrsefllheg |
| 2221 | rlldisisav lnslvasvic dvlfqigql |

SEQ ID NO: 56 Human ARID1B cDNA Sequence Variant 3 (NM_001346813.1,
CDS: from 76 to 6945)

| | |
|---|---|
| 1 | gggggcggcg gcgacggcgg cggcggcctg aacagtgtgc accaccaccc cctgctcccc |
| 61 | cgtcacgaac tcaacatggc ccataacgcg ggcgccgcgg ccgccgccgg cacccacagc |
| 121 | gccaagagcg gcggctccga ggcggctctc aaggagggtg gaagcgccgc cgcgctgtcc |
| 181 | tcctcctcct cctcctccgc ggcggcagcg gcggcatcct cttcctcctc gtcgggcccg |
| 241 | ggctcggcca tggagacggg gctgctcccc aaccacaaac tgaaaaccgt tggcgaagcc |
| 301 | cccgccgcgc cgccccacca gcagcaccac caccaccacc atgcccacca ccaccaccac |
| 361 | catgcccacc acctccacca ccaccacgca ctacagcagc agctaaacca gttccagcag |
| 421 | cagcagcagc agcagcaaca gcagcagcag cagcagcagc aacagcaaca tcccatttcc |
| 481 | aacaacaaca gcttgggcgg cgcgggcggc ggcgcgcctc agcccggccc cgacatggag |
| 541 | cagccgcaac atggaggcgc caaggacagt gctgcgggcg gccaggccga ccccccgggc |
| 601 | ccgccgctgc tgagcaagcc gggcgacgag gacgacgcgc cgcccaagat gggggagccg |
| 661 | gcgggcggcc gctacgagca cccgggcttg ggcgccctgg gcacgcagca gccgccggtc |
| 721 | gccgtgcccg ggggcggcgg cggcccggcg gccgtcccgg agtttaataa ttactatggc |
| 781 | agcgctgccc ctgcgagcgg cggccccggc ggccgcgctg ggccttgctt tgatcaacat |
| 841 | ggcggacaac aaagccccgg gatggggatg atgcactccg cctccgccgc cgccgccggg |
| 901 | gcccccggca gcatggaccc cctgcagaac tcccacgaag ggtaccccaa cagccagtgc |
| 961 | aaccattatc cgggctacag ccggcccggc gcgggcggcg gcggcggcgg cggcggcgga |
| 1021 | ggaggaggag gcagcggagg aggaggagga ggaggaggag caggagcagg aggagcagga |
| 1081 | gcgggagctg tggcggcggc ggccgcggcg gcggcggcag cagcaggagg cggcggcggc |
| 1141 | ggcggctatg ggggctcgtc cgcggggtac ggggtgctga gctccccccg gcagcagggc |
| 1201 | ggcggcatga tgatgggccc cgggggcggc ggggccgcga gcctcagcaa ggcggccgcc |
| 1261 | ggctcggcgg cggggggctt ccagcgcttc gccggccaga accagcaccc gtcgggggcc |
| 1321 | accccgaccc tcaatcagct gctcacctcg cccagcccca tgatgcggag ctacggcggc |
| 1381 | agctaccccg agtacagcag ccccagcgcg ccgccgccgc cgccgtcgca gccccagtcc |
| 1441 | caggcggcgg cggcgggggc ggcggcgggc ggccagcagg cggccgcggg catgggcttg |
| 1501 | ggcaaggaca tgggcgccca gtacgccgct gccagcccgg cctgggcggc cgcgcaacaa |
| 1561 | aggagtcacc cggcgatgag ccccggcacc cccggaccga ccatgggcag atcccagggc |
| 1621 | agcccaatgg atccaatggt gatgaagaga cctcagttgt atggcatggg cagtaaccct |
| 1681 | cattctcagc ctcagcagag cagtccgtac ccaggaggtt cctatggccc tccaggccca |
| 1741 | cagcggtatc caattggcat ccagggtcgg actcccgggg ccatggccgg aatgcagtac |
| 1801 | cctcagcagc agatgccacc tcagtatgga cagcaaggtg tgagtggtta ctgccagcag |
| 1861 | ggccaacagc catattacag ccagcagccg cagcccccgc acctcccacc ccaggcgcag |
| 1921 | tatctgccgt cccagtccca gcagaggtac cagccgcagc aggacatgtc tcaggaaggc |
| 1981 | tatggaacta gatctcaacc tcctctggcc cccggaaaac ctaaccatga agacttgaac |
| 2041 | ttaatacagc aagaaagacc atcaagttta ccagatctgt ctggctccat tgatgacctc |
| 2101 | cccacgggaa cggaagcaac tttgagctca gcagtcagtg catccgggtc cacgagcagc |
| 2161 | caaggggatc agagcaaccc ggcgcagtcg cctttctccc cacatgcgtc ccctcatctc |
| 2221 | tccagcatcc cggggggccc atctccctct cctgttggct ctcctgtagg aagcaaccag |
| 2281 | tctcgatctg gcccaatctc tcctgcaagt atcccaggta gtcagatgcc tccgcagcca |
| 2341 | cccgggagcc agtcagaatc cagttcccat cccgccttga gccagtcacc aatgccacag |
| 2401 | gaaagaggtt ttatggcagg cacacaaaga aaccctcaga tggctcagta tggacctcaa |
| 2461 | cagacaggac catccatgtc gcctcatcct tctcctgggg gccagatgca tgctggaatc |
| 2521 | agtagctttc agcagagtaa ctcaagtggg acttacggtc cacagatgag ccagtatgga |
| 2581 | ccacaaggta actactccag acccccagcg tatagtgggg tgcccagtgc aagctacagc |
| 2641 | ggcccagggc ccggtatggg tatcagtgcc aacaaccaga tgcatggaca agggccaagc |
| 2701 | cagccatgtg gtgctgtgcc cctgggacga atgccatcag ctgggatgca gaacagacca |
| 2761 | tttcctggaa atatgagcag catgaccccc agttctcctg gcatgtctca gcagggaggg |
| 2821 | ccaggaatgg ggccgccaat gccaactgtg aaccgtaagg cacaggaggc agccgcagca |
| 2881 | gtgatgcagg ctgctgcgaa ctcagcacaa agcaggcaag gcagtttccc cggcatgaac |
| 2941 | cagagtggac ttatggcttc cagctctccc tacagccagc ccatgaacaa cagctctagc |
| 3001 | ctgatgaaca cgcaggcgcc gccctacagc atggcgcccg ccatggtgaa cagctcggca |
| 3061 | gcatctgtgg gtcttgcaga tatgatgtct cctggtgaat ccaaactgcc cctgcctctc |
| 3121 | aaagcagacg gcaaagaaga aggcactcca cagcccgaga gcaagtcaaa ggatagctac |
| 3181 | agctctcagg gtatttctca gcccccaacc ccaggcaacc tgccagtccc ttccccaatg |
| 3241 | tcccccagct ctgctagcat ctcctcattt catggagatg aaagtgatag cattagcagc |
| 3301 | ccaggctggc caaagactcc atcaagccct aagtccagct cctccaccac tactggggag |
| 3361 | aagatcacga aggtgtacga gctggggaat gagccagaga gaaagctctg ggtcgaccga |
| 3421 | tacctcacct tcatggaaga gagaggctct cctgtctcaa gtctgcctgc cgtgggcaag |
| 3481 | aagcccctgg acctgttccg actctacgtc tgcgtcaaag agatcggggg tttggcccag |
| 3541 | gttaataaaa acaagaagtg gcgtgagctg gcaaccaacc taaacgttgg cacctcaagc |
| 3601 | agtgcagcga gctccctgaa aaagcagtat attcagtacc tgtttgcctt tgagtgcaag |
| 3661 | atcgaacgtg gggaggagcc cccgccggaa gtcttcagca ccggggacac caaaaagcag |
| 3721 | cccaagctcc agccgccatc tcctgctaac tcgggatcct tgcaaggccc acagaccccc |
| 3781 | cagtcaactg gcagcaattc catggcagag gttccaggtg acctgaagcc acctacccca |
| 3841 | gcctccaccc ctcacggcca gatgactcca atgcaaggtg gaagaagcag tacaatcagt |
| 3901 | gtgcacgacc cattctcaga tgtgagtgat tcatccttcc cgaaacggaa ctccatgact |
| 3961 | ccaaacgccc cctaccagca gggcatgagc atgcccgatg tgatgggcag gatgccctat |
| 4021 | gagcccaaca aggacccctt tgggggaatg agaaaagtgc ctggaagcag cgagcccttt |
| 4081 | atgacgcaag gacagatgcc caacagcagc atgcaggaca tgtacaacca aagtccctcc |
| 4141 | ggagcaatgt ctaacctggg catggggcag cgccagcagt ttccctatgg agccagttac |
| 4201 | gaccgaaggc atgaacctta tgggcagcag tatccaggcc aaggccctcc ctcgggacag |
| 4261 | ccgccgtatg gagggcacca gcccggcctg tacccacagc agccgaatta caaacgccat |
| 4321 | atggacggca tgtacgggcc cccagccaag cgccacgagg gcgacatgta caacatgcag |
| 4381 | tacagcagcc agcagcagga gatgtacaac cagtatggag gctcctactc gggcccggac |
| 4441 | cgcaggccca tccagggcca gtacccgtat ccctacagca gggagaggat gcagggcccg |
| 4501 | gggcagatcc agacacacgg aatcccgcct cagatgatgg gcggcccgct gcagtcgtcc |
| 4561 | tccagtgagg ggcctcagca gaatatgtgg gcagcacgca atgatatgcc ttatccctac |
| 4621 | cagaacaggc agggccctgg cggccctaca caggcgcccc cttacccagg catgaaccgc |
| 4681 | acagacgata tgatggtacc cgatcagagg ataaatcatg agagccagtg gccttctcac |
| 4741 | gtcagccagc gtcagcctta tatgtcgtcc tcagcctcca tgcagcccat cacacgccca |
| 4801 | ccacagccgt cctaccagac gccaccgtca ctgccaaatc acatctccag ggcgcccagc |
| 4861 | ccagcgtcct tccagcgctc cctggagaac cgcatgtctc caagcaagtc tccttttctg |
| 4921 | ccgtctatga agatgcagaa ggtcatgccc acggtcccca catcccaggt caccgggcca |
| 4981 | ccaccccaac cacccccaat cagaagggag atcacctttc ctcctggctc agtagaagca |
| 5041 | tcacaaccag tcttgaaaca aaggcgaaag attacctcca aagatatcgt tactcctgag |
| 5101 | gcgtggcgtg tgatgatgtc ccttaaatca ggtcttttgg ctgagagtac gtgggctttg |
| 5161 | gacactatta atattcttct gtatgatgac agcactgttg ctactttcaa tctctcccag |
| 5221 | ttgtctggat ttctcgaact tttagtcgag tactttagaa aatgcctgat tgacattttt |
| 5281 | ggaattctta tggaatatga agtgggagac cccagccaaa aagcacttga tcacaacgca |
| 5341 | gcaaggaagg atgacagcca gtccttggca gacgattctg ggaaagagga ggaagatgct |
| 5401 | gaatgtattg atgacgacga ggaagacgag gaggatgagg aggaagacag cgagaagaca |
| 5461 | gaaagcgatg aaaagagcag catcgctctg actgccccgg acgccgctgc agacccaaag |
| 5521 | gagaagccca agcaagccag taagttcgac aagctgccaa taaagatagt caaaaagaac |
| 5581 | aacctgtttg ttgttgaccg atctgacaag ttggggcgtg tgcaggagtt caatagtggc |
| 5641 | cttctgcact ggcagctcgg cgggggtgac accaccgagc acattcagac tcactttgag |
| 5701 | agcaagatgg aaattcctcc tcgcaggcgc ccacctcccc ccttaagctc cgcaggtaga |
| 5761 | aagaaagagc aagaaggcaa aggcgactct gaagagcagc aagagaaaag catcatagca |
| 5821 | accatcgatg acgtcctctc tgctcggcca ggggcattgc ctgaagacgc aaaccctggg |
| 5881 | ccccagaccg aaagcagtaa gtttcccttt ggtatccagc aagccaaaag tcaccggaac |
| 5941 | atcaagctgc tggaggacga gcccaggagc cgagacgaga ctcctctgtg taccatcgcg |
| 6001 | cactggcagg actcgctggc taagcgatgc atctgtgtgt ccaatattgt ccgtagcttg |
| 6061 | tcattcgtgc ctggcaatga tgccgaaatg tccaaacatc caggcctggt gctgatcctg |
| 6121 | gggaagctga ttcttcttca ccacgagcat ccagagagaa agcgagcacc gcagacctat |
| 6181 | gagaaagagg aggatgagga caagggggtg gcctgcagca aagatgagtg gtggtgggac |
| 6241 | tgcctcgagg tcttgaggga taacacgttg gtcacgttgg ccaacatttc cgggcagcta |
| 6301 | gacttgtctg cttacacgga aagcatctgc ttgccaattt tggatggctt gctgcactgg |
| 6361 | atggtgtgcc cgtctgcaga ggcacaagat ccctttccaa ctgtgggacc caactcggtc |
| 6421 | ctgtcgcctc agagacttgt gctggagacc ctctgtaaac tcagtatcca ggacaataat |
| 6481 | gtggacctga tcttggccac tcctccattt agtcgtcagg agaaattcta tgctacatta |
| 6541 | gttaggtacg ttggggatcg caaaaaccca gtctgtcgag aaatgtccat ggcgctttta |
| 6601 | tcgaaccttg cccaagggga cgcactagca gcaagggcca tagctgtgca gaaaggaagc |
| 6661 | attggaaact tgataagctt cctagaggat ggggtcacga tggcccagta ccagcagagc |
| 6721 | cagcacaacc tcatgcacat gcagcccccg cccctggaac cacctagcgt agacatgatg |
| 6781 | tgcagggcgg ccaaggcttt gctagccatg gccagagtgg acgaaaaccg ctcggaattc |
| 6841 | cttttgcacg agggccggtt gctggatatc tcgatatcag ctgtcctgaa ctctctggtt |
| 6901 | gcatctgtca tctgtgatgt actgtttcag attgggcagt tatgacataa gtgagaaggc |
| 6961 | aagcatgtgt gagtgaagat tagagggtca catataactg gctgttttct gttcttgttt |
| 7021 | atccagcgta ggaagaagga aaagaaaatc tttgctcctc tgccccattc actatttacc |
| 7081 | aattgggaat taaagaaata attaatttga acagttatga aattaatatt tgctgtctgt |
| 7141 | gtgtataagt acatcctttg gggttttttt tttctctttt ttttaaccaa agttgctgtc |
| 7201 | tagtgcattc aaaggtcact ttttgttctt cacagatctt tttaatgttc tttcccatgt |
| 7261 | tgtattgcat ttttggggga agcaaattga ctttaaagaa aaaagttgtg gcaaaagatg |
| 7321 | ctaagatgcg aaaatttcac cacactgagt caaaaaggtg aaaaattatc catttcctat |
| 7381 | gcgttttact cctcagagaa tgaaaaaaac tgcatcccat cacccaaagt tctgtgcaat |
| 7441 | agaaatttct acagatacag gtataggggc tcaaggaggt atgtcggtca gtagtcaaaa |
| 7501 | ctatgaaatg atactggttt ctccacagga atatggttcc attaggctgg gagcaaaaac |
| 7561 | aatgtttttt aagattgaga atacatacct gacaacgatc cggaaactgc tcctcaccac |
| 7621 | tcccgtcatg cctgctgtcg gcgtttgacc ttccacgtga cagttcttca caattccttt |
| 7681 | catcattttt taaatatttt ttttactgcc tatgggctgt gatgtatata gaagttgtac |
| 7741 | attaaacata ccctcatttt tttcttttct tttttttttt tttttttagt acaaagtttt |
| 7801 | agtttctttt tcatgatgtg gtaactacga agtgatggta gatttaaata attttttatt |
| 7861 | tttattttat atattttttc attagggcca tatctccaaa aaaagaaaga aaaaatacaa |
| 7921 | aaaacaaaaa caaaaaaaaa agagggtaat gtacaagttt ctgtatgtat aaagtcatgc |
| 7981 | tcgatttcag gagagcagct gatcacaatt tgcttcatga atcaaggtgt ggaaatggtt |
| 8041 | atatatggat tgatttagaa aatggttacc agtacagtca aaaaagagaa aatgaaaaaa |
| 8101 | atacaactaa aaggaagaaa cacaacttca aagatttttc agtgatgaga atccacattt |
| 8161 | gtatttcaag ataatgtagt ttaaaaaaaa aaaaaagaaa aaaacttgat gtaaattcct |
| 8221 | ccttttcctc tggcttaatg aatatcattt attcagtata aaatctttat atgttccaca |
| 8281 | tgttaagaat aaatgtacat taaatcttgt taagcactgt gatgggtgtt cttgaatact |
| 8341 | gttctagttt ccttaaagtg gtttcctagt aatcaagtta tttacaagaa ataggggaat |
| 8401 | gcagcagtgt attcacatta taaaacccta catttggaag agacctttag gggttaccta |
| 8461 | ctttagagtg gggagcaaca gtttgatttt ctcaaattac ttagctaatt agtctttctt |
| 8521 | tgaagcaatt aactctaacg acattgaggt atgatcattt tcagtattta tgggaggtgg |
| 8581 | ctgctgaccc acttgaggtg agatctcaga agcttaactg gcctgaaaat gtaacattct |
| 8641 | gccttttact aactccatct tagtttaatc aaagttcaat ctattccttg tttcttctgt |
| 8701 | gtgcctcaga gttattttgc atttagttta ctccaccgtg tataatattt atactgtgca |
| 8761 | atgttaaaaa agaatctgtt atattgtatg tggtgtacat agtgcaaagt gatgatttct |
| 8821 | atttcagggc atattatggt tctcatattc cttcctacct ggtgcacagt agctttttaa |
| 8881 | tactagtcac ttctaattta aactttctct tcctgggtca ttgactgtta ctgtgtaata |
| 8941 | atcgatttct ttgaaactgc tgcataatta tgctgttagt ggacctctac ctcttctctt |
| 9001 | ccctctccca atcacagtat actcagaatc cccagcccct cgcatacatt gtgtcggttc |
| 9061 | acattactca cagtaatata tggaagagtt agacaagaac atgcagttac agtcattgtg |
| 9121 | agacgtgact ctccagtgtc acgaggaaaa aaatcatctt ttctgcaaac agtctctcat |
| 9181 | ctgtcaactc ccacattact gagtcaaaca gtcttcttac ataacaatgc aaccaaatat |
| 9241 | atgttgaatt aaagacccat ttataattct gctttaaata catctgcttg ctaagaacag |
| 9301 | atttcagtgc tccaagcttc aaatatggag atttgtaaga gggaattcaa tattattcta |
| 9361 | atttctctct tacagagtac aaataaaagg tgtatacaaa ctccgaacat atccagtatt |
| 9421 | ccaattcctt tgtcaatcag aagagtaaaa taattaacaa aagactgttg ttatggtttg |
| 9481 | cattgtaacc gatacgcaga gtctgaccgt tgggcaacaa gtttttctat cctgatgcgc |
| 9541 | aacacagtct ctagagacta atccaggaag actttagcct cctttccata ttctcacccc |
| 9601 | cgaatcaaga tttacagaag cccacgaaga atttacagcc tgcttgagat catcttgcct |
| 9661 | ataaactgag ttattgcttt gtcctaaaaa ttagtcggtt tttttttttc tatgaggctt |
| 9721 | ttcagaaatt tacaggatgc ccagacttta catgtgtacc aaaaaaaaaa aaaagataaa |
| 9781 | aaataaaggt gcaaagaaag tttagtattt tggaatggtg ctataaagtt gaa |

SEQ ID NO: 57 Human ARID1B Amino Acid Sequence isoform C
(NP_001333742.1)

| | |
|---|---|
| 1 | mahnagaaaa agthsaksgg seaalkeggs aaalssssss saaaaaasss sssgpgsame |
| 61 | tgllpnhklk tvgeapaapp hqqhhhhhha hhhhhhahhl hhhhalqqql nqfqqqqqqq |
| 121 | qqqqqqqqqq qhpisnnnsl ggagggapqp gpdmeqpqhg gakdsaaggq adppgpplls |
| 181 | kpgdeddapp kmgepaggry ehpglgalgt qqppvavpgg gggpaavpef nnyygsaapa |
| 241 | sggpggragp cfdqhggqqs pgmgmmhsas aaaagapgsm dplqnshegy pnsqcnhypg |
| 301 | ysrpgagggg gggggggggs ggggggggag aggagagava aaaaaaaaaa gggggggygg |
| 361 | ssagygvlss prqqgggmmm gpggggaasl skaaagsaag gfqrfagqnq hpsgatptln |
| 421 | qlltspspmm rsyggsypey sspsappppp sqpqsqaaaa gaaaggqqaa agmglgkdmg |
| 481 | aqyaaaspaw aaaqqrshpa mspgtpgptm grsqgspmdp mvmkrpqlyg mgsnphsqpq |
| 541 | qsspypggsy gppgpqrypi giqgrtpgam agmqypqqqm ppqygqqgvs gycqqqqqpy |
| 601 | ysqqpqpphl ppqaqylpsq sqqryqpqqd msqegygtrs qpplapgkpn hedlnliqqe |
| 661 | rpsslpdlsg siddlptgte atlssavsas gstssqgdqs npaqspfsph asphlssipg |
| 721 | gpspspvgsp vgsnqsrsgp ispasipgsq mppqppgsqs essshpalsq spmpqergfm |
| 781 | agtqrnpqma qygpqqtgps msphpspggq mhagissfqq snssgtygpq msqygpqgny |
| 841 | srppaysgvp sasysgpgpg mgisannqmh gqgpsqpcga vplgrmpsag mqnrpfpgnm |
| 901 | ssmtpsspgm sqqggpgmgp pmptvnrkaq eaaaavmqaa ansaqsrqgs fpgmnqsglm |
| 961 | assspysqpm nnssslmntq appysmapam vnssaasvgl admmspgesk lplplkadgk |
| 1021 | eegtpqpesk skdsyssqgi sqpptpgnlp vpspmspssa sissfhgdes dsisspgwpk |
| 1081 | tpsspkssss tttgekitkv yelgneperk lwvdryltfm eergspvssl pavgkkpldl |
| 1141 | frlyvcvkei gglaqvnknk kwrelatnln vgtsssaass lkkqyiqylf afeckierge |
| 1201 | epppevfstg dtkkqpklqp pspansgslq gpqtpqstgs nsmaevpgdl kpptpastph |
| 1261 | gqmtpmqggr sstisvhdpf sdvsdssfpk rnsmtpnapy qqgmsmpdvm grmpyepnkd |
| 1321 | pfggmrkvpg ssepfmtqgq mpnssmqdmy nqspsgamsn lgmgqrqqfp ygasydrrhe |
| 1381 | pygqqypgqg ppsgqppygg hqpglypqqp nykrhmdgmy gppakrhegd mynmqyssqq |
| 1441 | qemynqyggs ysgpdrrpiq gqypypysre rmqgpgqiqt hgippqmmgg plqssssegp |
| 1501 | qqnmwaarnd mpypyqnrqg pggptqappy pgmnrtddmm vpdqrinhes qwpshvsqrq |
| 1561 | pymsssasmq pitrppqpsy qtppslpnhi srapspasfq rslenrmsps kspflpsmkm |
| 1621 | qkvmptvpts qvtgpppqpp pirreitfpp gsveasqpvl kqrrkitskd ivtpeawrvm |
| 1681 | mslksgllae stwaldtini llyddstvat fnlsqlsgfl ellveyfrkc lidifgilme |
| 1741 | yevgdpsqka ldhnaarkdd sqsladdsgk eeedaecidd deedeedeee dsektesdek |
| 1801 | ssialtapda aadpkekpkq askfdklpik ivkknnlfvv drsdklgrvq efnsgllhwq |
| 1861 | lgggdttehi qthfeskmei pprrrppppl ssagrkkeqe gkgdseeqqe ksiiatiddv |
| 1921 | lsarpgalpe danpgpqtes skfpfgiqqa kshrniklle deprsrdetp lctiahwqds |
| 1981 | lakrcicvsn ivrslsfvpg ndaemskhpg lvlilgklil lhhehperkr apqtyekeed |
| 2041 | edkgvacskd ewwwdclevl rdntlvtlan isgqldlsay tesiclpild gllhwmvcps |
| 2101 | aeaqdpfptv gpnsvlspqr lvletlckls iqdnnvdlil atppfsrqek fyatlvryvg |
| 2161 | drknpvcrem smallsnlaq gdalaaraia vqkgsignli sfledgvtma qyqqsqhnlm |
| 2221 | hmqppplepp svdmmcraak allamarvde nrsefllheg rlldisisav lnslvasvic |
| 2281 | dvlfqigql |

SEQ ID NO: 58 Mouse ARID1B cDNA Sequence (NM_001085355.1, CDS: from 22
to 6756)

| | |
|---|---|
| 1 | tcggcgggcc ccggctcgac catggagacc gggctgctcc ccaaccacaa actgaaagcc |
| 61 | gttggcgagg cccccgctgc accgccccat cagcagcacc accaccacca tgcccaccac |
| 121 | caccaccacc accatgccca ccacctccac cacctccacc accaccacgc actacagcag |
| 181 | cagctaaacc agttccagca gccgcagccg ccgcagccac agcagcagca gccgccgcca |
| 241 | ccgccgcagc agcagcatcc cactgccaac aacagcctgg gcggtgcggg cggcggcgcg |
| 301 | cctcagcccg gcccggacat ggagcagccg caacatggag gcgccaagga cagtgtcgcg |
| 361 | ggcaatcagg ctgacccgca gggccagcct ctgctgagca aaccgggcga cgaggacgac |
| 421 | gcgccgccca agatggggga gccggcgggc agccgctatg agcacccggg cctgggcgcg |
| 481 | cagcagcagc ccgcgccggt cgccgtgccc gggggcggcg gcggcccagc ggccgtctcg |
| 541 | gagtttaata attactatgg cagcgctgcc cctgctagcg gcggccccgg cggccgcgct |
| 601 | gggccttgct ttgatcaaca tggcggacaa caaagccccg ggatggggat gatgcactcc |
| 661 | gcctctgccg ccgccggggc ccccagcagc atggaccccc tgcagaactc ccacgaaggg |
| 721 | taccccaaca gccagtacaa ccattatccg ggctacagcc ggcccggcgc gggcggcggc |
| 781 | ggcggcggcg gcggaggagg aggaggcagc ggaggaggtg gaggaggagg aggagcagga |
| 841 | ggagcaggag gagcagcggc agcggcagca ggagccggag ctgtggcggc ggcggccgcg |
| 901 | gcggcggcgg cagcagcagc agcagcagga ggaggcggtg gcggcggcta tgggagctcg |
| 961 | tcctcggggt acggggtgct gagctccccg cggcagcagg gcggcggcat gatgatgggc |
| 1021 | cccgggggcg gcggggccgc gagcctcagc aaggcggccg ccggcgcggc ggcggcggcg |
| 1081 | gggggcttcc agcgcttcgc cggccagaac cagcacccgt cgggggctac accgaccctc |
| 1141 | aaccagctgc tcacctcacc cagccccatg atgaggagct acggcggtag ctaccccgac |
| 1201 | tacagcagct ccagcgcgcc gccgccgccg tcgcagcccc agtcccaggc ggcggcgggg |
| 1261 | gcggcggcgg gtggccagca ggcggccgcg ggcatgggct tgggcaagga cctaggcgcc |
| 1321 | cagtacgccg ctgccagccc ggcctgggcg gccgcgcaac aaaggagtca cccggcgatg |
| 1381 | agccccggca cccccggacc gaccatgggc agatcccagg gcagcccgat ggacccaatg |
| 1441 | gtgatgaaga gacctcagtt gtatgggatg ggtactcacc cccactccca gccacagcag |
| 1501 | agcagcccat acccaggagg ctcctacggt cccccaggtg cacagcggta tccccttggc |
| 1561 | atgcagggcc gggctccagg ggccctggga ggcttgcagt acccgcagca gcagatgcca |
| 1621 | ccgcagtacg gacagcaagc tgtgagtggc tactgccagc aaggccagca gccatactac |
| 1681 | aaccagcagc cgcagccctc gcacctcccg ccccaggcac agtacctgca gccggcggcg |
| 1741 | gcgcagtccc agcagaggta ccagccacag caggacatgt ctcaagaagg ctatggaact |
| 1801 | agatctcagc ctcctctggc ccctggaaaa tccaaccatg aagacttgaa tttaattcaa |
| 1861 | caggaaagac catcgagtct accagacctg tctggctcca tcgatgacct ccccacggga |
| 1921 | acagaagcaa ctctgagctc agcagtcagt gcatccgggt ctacaagcag ccagggagat |
| 1981 | cagagcaacc cagcgcagtc tcctttctcc ccacatgcat cacctcacct ctccagcatc |
| 2041 | cctggagggc cgtcaccttc tcctgttggc tctcctgtgg gaagcaacca atcgaggtct |
| 2101 | ggtccgatct cccctgcgag tattccaggt agccagatgc ctccgcaacc acctggaagc |
| 2161 | cagtcagaat ccagttccca tcctgccttg agccagtcac caatgccaca ggaaagaggt |
| 2221 | tttatgacag gcactcagag aaaccctcag atgtctcagt acggacctca gcagacagga |
| 2281 | ccatccatgt cgcctcaccc atctcctggg ggccagatgc atcctgggat cagtaacttt |
| 2341 | cagcagagta actcaagtgg cacgtacggc ccacagatga gccagtatgg accccaaggc |
| 2401 | aactactcca gaaccccaac atatagcggg gtacccagtg caagctacag cggcccaggg |
| 2461 | cccggtatgg gcatcaatgc caacaaccag atgcatggac aagggccagc ccagccatgt |
| 2521 | ggtgctatgc ccctgggacg aatgccttca gctgggatgc agaacagacc atttcctgga |
| 2581 | accatgagca gcgtcacccc cagttctcct ggcatgtctc aacagggagg gccaggaatg |
| 2641 | ggcccaccaa tgcccactgt gaaccggaag gcccaggaag ctgccgcagc tgtgatgcag |
| 2701 | gctgctgcaa actcagcaca aagcaggcaa ggcagttttc ctggcatgaa ccagagtggc |
| 2761 | ctggtggcct ccagctctcc ctacagccag tccatgaaca acaactccag cctgatgagc |
| 2821 | acccaggccc agccctacag catgacgccc acaatggtga acagctccac agcatctatg |
| 2881 | ggtcttgcag atatgatgtc tcccagtgag tccaaattgt ctgtgcctct taaagcagat |
| 2941 | ggtaaagaag aaggcgtgtc ccagcctgag agcaagtcaa aggacagcta tggctctcag |
| 3001 | ggcatttccc agcctccaac cccaggcaac ctgcctgtcc cttccccaat gtctcccagc |
| 3061 | tctgccagca tctcctcctt tcatggagat gagagtgaca gcattagcag cccaggctgg |
| 3121 | cccaagacac catcaagccc taagtccagc tcttcctcca ccactgggga gaagatcacg |
| 3181 | aaggtctatg agctggggaa tgagccggag aggaagctgt gggtcgaccg ttacctaacg |
| 3241 | ttcatggaag agaggggctc cccggtgtcc agtctgccag cagtgggcaa gaagcccctg |
| 3301 | gacctgttcc gactgtatgt ctgcgtcaag gagattggag gtttggcgca ggttaataaa |
| 3361 | aacaagaagt ggcgtgagct ggcaaccaac ctgaacgttg gcacttccag cagcgcagcc |
| 3421 | agctctctga aaaagcagta tattcagtac ctgttcgcct ttgagtgcaa aactgagcgc |
| 3481 | ggggaggagc ccccacctga agtcttcagc accggggatt cgaagaagca gccaaagctc |
| 3541 | cagccgccat ctcctgctaa ctcaggatcc ttacaaggcc cacagactcc acagtcaact |
| 3601 | gggagcaatt cgatggcaga ggttccaggt gacctgaagc caccaacccc agcctctacc |
| 3661 | cctcatggac agatgactcc catgcaaagc ggaagaagca gtacagtcag tgtgcatgac |
| 3721 | ccgttctcag acgtgagtga ctcagcgtac ccaaaacgga actccatgac tccaaacgcc |
| 3781 | ccataccagc agggcatggg catgccagac atgatgggca ggatgcccta tgaacccaac |
| 3841 | aaggaccctt tcagtggaat gagaaaagtg cctggaagta gtgagccctt tatgacacaa |
| 3901 | ggacaggtgc ccaacagcgg catgcaggac atgtacaacc agagcccctc aggggccatg |
| 3961 | tccaatctgg gcatgggaca gcggcagcag tttccctatg gaaccagtta tgaccgaagg |
| 4021 | catgaggctt acggacagca gtacccaggc caaggccctc ccacaggaca gccaccgtat |
| 4081 | ggaggacacc agcctggcct gtacccacag cagccgaatt acaaacgtca tatggatggc |
| 4141 | atgtacgggc ctccagccaa gcggcacgag ggagacatgt acaacatgca gtatggcagc |
| 4201 | cagcagcagg agatgtataa ccagtatgga ggctcctact ctggcccgga cagaaggccc |
| 4261 | atccagggac aatatcccta cccctacaac agagaaagga tgcagggccc aggccagatg |
| 4321 | cagccacacg gaatcccacc tcagatgatg gggggcccca tgcagtcatc ctccagcgag |
| 4381 | gggcctcagc agaacatgtg ggctacacgc aacgatatgc cttatcccta ccagagcagg |
| 4441 | caaggcccgg gcggccctgc acaggccccc ccttacccag gcatgaaccg cacagatgat |
| 4501 | atgatggtac ctgagcagag gatcaatcac gagagccagt ggccttctca cgtcagccag |
| 4561 | cgccagcctt acatgtcatc ttcggcctcc atgcagccca tcacgcgccc acctcagtca |
| 4621 | tcctaccaga cgccgccgtc actgccaaac cacatctcca gggcacccag ccccgcctcc |
| 4681 | ttccagcgct ccctggagag tcgcatgtct ccaagcaagt ctcccttcct gcccaccatg |
| 4741 | aagatgcaga aggtcatgcc cacagtcccc acatcccagg tcaccgggcc ccccccacag |
| 4801 | cctccaccaa tcagaaggga gattaccttt cctcctggct ccgtagaagc atcacagcca |
| 4861 | atcctgaaac aaaggcgaaa gattacctca aaagatattg ttactcccga ggcgtggcgt |
| 4921 | gtgatgatgt cccttaaatc gggtctgttg gctgagagca cgtgggctct ggacaccatc |
| 4981 | aatattctcc tctatgatga cagcaccgtc gccaccttca atctttccca gctgtctgga |
| 5041 | ttcctggaac tattagtaga gtactttcga aaatgcctaa ttgacatttt cggaattctt |
| 5101 | atggaatatg aagtgggtga ccccagccaa aaggctcttg atcaccgttc agggaagaaa |
| 5161 | gatgacagcc agtccctgga agatgattct gggaaggaag acgatgatgc tgagtgtctt |
| 5221 | gtggaagagg aggaggagga agaggaggag gaggaagaca gtgaaaagat agagtcagag |
| 5281 | gggaagagca gccctgccct agctgctcca gatgcctccg tggaccccaa ggagacgcca |
| 5341 | aagcaggcca gtaagtttga caagctgccc ataaagattg tcaaaaagaa caagctgttt |
| 5401 | gtggtggacc ggtccgacaa gctgggccga gtgcaggagt tcagcagcgg gctcctccac |
| 5461 | tggcagctgg gtggtggcga cactaccgag cacatccaga ctcacttcga gagcaagatg |
| 5521 | gagatccctc ctcgcaggcg tccacctccg cctctaagct ccacgggtaa gaagaaagag |
| 5581 | ctggaaggca aaggtgattc tgaagagcag ccagagaaaa gtatcatagc caccatcgat |
| 5641 | gacgtcttgt ctgcccggcc aggggctctg cctgaagaca ccaacccagg accccagacc |
| 5701 | gacagcggca agtttccctt tggaatccag caggccaaaa gccaccggaa catcaggctc |
| 5761 | ctggaagacg agcccaggag ccgagacgag acgccgctgt gcaccatcgc gcactggcag |
| 5821 | gactcactgg ccaagcgctg catctgtgtg tcgaacatcg tgcggagctt gtctttcgtg |
| 5881 | cctggcaacg acgcagagat gtccaaacac ccgggcttgg tgctgatcct gggaaagctg |
| 5941 | attctgctgc atcacgagca tccggagaga aagcgggcgc cacagaccta tgagaaggag |
| 6001 | gaggacgagg acaagggggt ggcctgcagc aaagatgagt ggtggtggga ctgcctcgag |
| 6061 | gtcttgcggg ataacaccct ggtcacgttg gcgaacattt ccgggcagct agacttgtct |
| 6121 | gcttacacag agagcatctg cttgccgatc ctggacggct tgctacactg gatggtgtgc |
| 6181 | ccgtccgcag aggctcagga cccctttccc actgtggggc ccaactcagt cctgtcgccg |
| 6241 | cagagacttg tgctggagac cctgtgtaaa ctcagtatcc aggacaacaa cgtggacctg |
| 6301 | atcttggcca cgcctccatt tagtcgtcag gagaaatttt atgctacatt agttaggtac |
| 6361 | gttggggatc gcaaaaatcc agtctgtcga gaaatgtcca tggcgctttt atcgaacctt |
| 6421 | gcccaggggg acacactggc ggcgagggca atagctgtgc agaaaggaag cattggtaac |
| 6481 | ttgataagct tcctagagga cggggtgacg atggcgcagt accagcagag ccagcataac |
| 6541 | cttatgcaca tgcagccccc acctctggaa ccccctagtg tagacatgat gtgccgggcg |
| 6601 | gccaaagctc tgctggccat ggccagagtg gacgagaacc gctcggagtt ccttttgcac |
| 6661 | gagggtcggt tgctggatat ctcaatatca gctgtcctga actctctggt tgcatctgtc |
| 6721 | atctgtgatg tactgtttca gattgggcag ttatgacatc cgtgaaggca cacatgtgtg |
| 6781 | agtgaacatt agagggtcac atataactgg ctgttttctg ttctcgttta tccagtgtaa |
| 6841 | gaagaaggaa aagaaaaatc tttgctcctc tgccccgttt actatttacc aattgggaat |
| 6901 | taaatcatta atttgaacag ttataaaatt aatatttgct gtctgtgtgt ataagtacat |
| 6961 | cctctggcgg ttttctgttt cttttttttt taaccaaagt tgccgtctag tgcattcaaa |
| 7021 | ggtcacaatt tttgtttgtt tgtttgtttg tttgtttttt cataattttt ttcatgttgt |
| 7081 | attgcagtct ttgggaagtg aattgacttt ataaagaaaa acgttttggc aaaaagtgct |
| 7141 | aagatagaaa aatgtcacca cactgggtca aaaacgtgaa aggaaaaatt gattcttaaa |
| 7201 | ttgatttcct atgaatttta ttcttcacag aatgataaaa gctaaactgc accccgtcac |
| 7261 | ccaaagctct gtgcaataga aacttctaga gatatagtgt aggggctgaa ggaggtatgg |
| 7321 | cagcagtagt cagggtcaat gatactgctt tctccaccgg aaagtggtta cgttaggcct |
| 7381 | cgagcaaaaa acagcgctct cagataggtg caaaaatcca ctcctagcag ccaacagcag |
| 7441 | gatcgcttcc tcaccacgac cgccatgtct gctgtggctc agcctccacg ggacaaagct |
| 7501 | tcaagatttc tttcatcatt tttttaaata ttttttttac tgcctatggg ctgtgatgta |
| 7561 | tatagaagtt gtacattaaa cataccctca tttttttctt cttttctttt tttctttttt |
| 7621 | tctttttctt tttttttttt tttagtacaa agtttttagt ttctttttca tgatgtggta |
| 7681 | actacgaagt gatggtagat ttaaataatt ttttattttt attttatata ttttttcatt |
| 7741 | aggaccatat ctccaaaaaa caagaaaaag aaacaaaaaa tacaaaaaat aaaaacaaac |
| 7801 | aaaaaaagag ggtaatgtac aagtttctgt atgtataaag tcatgctctg ttgggagagc |
| 7861 | ggctgatccc agtttgcttc atgaatcaaa gtgtggaaat ggttgcatac agattgattt |
| 7921 | agaaaatgga caccagtaca tacaaaaaaa gaaaaaagaa agaaaaccaa ctaaatggaa |
| 7981 | gaaacacaac ttcaaagatt tttctgtgac aagaatccac atttgtattt caagataatg |
| 8041 | tagtttaaga aaagaaaaaa aagaaaaaaa aagaaaaaaa cttgatgtaa attcctcctt |
| 8101 | ttcctctggc ttaatgaata tcatttattc agtataaaat ctttatatgt cccacatgtt |
| 8161 | aagaataaat gtacattaaa tcttgttacg cactgtgatg ggtgttcttg aatgctgttc |
| 8221 | tagtttgcct agcatggttg ccatagtaac caagttattt acaggaaata gggaagatgt |
| 8281 | aacaactgct tcctggtaat gatgcccaaa ggccagaagg gactttcagg gtttcctact |
| 8341 | tgagagtggg agcaacaatt tgattttctc agattgttta gctaattagg tcttctttga |
| 8401 | agcaattaac tctggtgaca ttgagaagtg gtaattccct catggatggg tggtggctgc |
| 8461 | caacccactg tgacatgggg ccctgcaagc taactggcct gaaaccacga ccttctgcct |
| 8521 | ctcactactg atttaaccca agtctgcacc cgtcatgttt cttctgtgtg cctccaagtt |
| 8581 | actctgcgtt agtttgctcc agcgtgtata atatttatat tgtgcaatgt taaagagaac |
| 8641 | gtgtcatatt gtatgccgtg tgtatagtgc caagtgatga ttctgtttca gagcatacct |
| 8701 | tccttcctgc ccagtccctg gctctctaat accccaccct gatggaaagt gcttcttcct |
| 8761 | gggtaattga ctgttactgt gtaacgctca gtctcattga aacttacata accatgctgc |
| 8821 | tggtgcccct tcctacccta cctctctcag cactcttcag ttgacacttc ccacacctgt |
| 8881 | cactgtggcc caccttgctc acgctgacat ctggaagagt tagacaggag cacacactta |
| 8941 | caacactagg agatgttatt ctggtgtcac gagaaagaaa ttggtttttc ctgcaaacag |
| 9001 | tcccatcacc aagcagcccc cacatcaggt cagcaaaaag atctgtgttg aatcaaaact |
| 9061 | ccatttataa ttctactaga tgggaataca tctgcttaca aaggacagat tttagtgttc |
| 9121 | tgtgatgaaa atatggagag tgcaagagag agttcaatgg aatcctaatc ttgctcttgc |
| 9181 | agacaatgaa tgaaaggtat agacaggctc agttccctgt cagaagagtg gtctcaaaga |
| 9241 | caagtggctg tatagcagcc aggcccagaa cagcctcgca gcacacacta acaccaagcg |
| 9301 | ggtgtctgag ctctcctagg aagccttgtg cctgccctcc ctccattcac ccagatccga |
| 9361 | ctcctggaag cccacgaaag agtcaccctt tgcttcacat ttcctgacga taccgagttg |
| 9421 | ctgctctgtc ctaaaaatat tagttctttt ccagggcttt cagaaatttg caggatgccc |
| 9481 | atactctaaa tgtgtaccaa aaagagagag aaataaaggt gcgaagaaag tttagtattt |
| 9541 | tggaatggtg cgataaaatg gaatctgttg gtttttaatg taacataaga tactattggc |
| 9601 | tggcactggc taaaaaaaat atctaagtgt tggagttgga tgcacaatca acttttactt |
| 9661 | agctattcaa agagtactta tgttttccaa gttaaaacag acttgttttt gacaggggcc |
| 9721 | gtgggtggtc ttatacaatg ccagctccta actgcagctt ctgagaactg gatatcgttt |
| 9781 | gccctgagag ctgcccgtct ccaactatgt gctgctgctg ccctgtgtgc tcagcccaca |
| 9841 | aggatgtgga gactggatag acaacccctt gcttcttgct gggttgtgct gagttctttg |
| 9901 | cagtccagtc aagtgcccag agctaccagc ctacgtccct catgcatcca agagaaatga |
| 9961 | tcttgactat catgatcaaa acagctgtag taatatttct agtaaatatt tctgatgact |
| 10021 | ctgtgtaatc tcctacaaca ggacactatt cattaacttg acagagacat gtgggcatgt |
| 10081 | ggtcctgctt tagtttaaca gacaagtcaa ccagttctca ttacttagga agagtgaggc |
| 10141 | tatgtctgtt acaatcccaa tgtggtgctt gcccttatcc aaagacagtc cgggggccct |
| 10201 | gtctgcctga actatgtctc gctccctctt gggcttccca ctgggatgtg aaaagataac |
| 10261 | caatggctcc caggttccca gtgcccccca aaccagtaat caggtctggg actacagaac |
| 10321 | ccgcaaaatc atacacaggc tgtttcaaag ccagtactct ctttatactc ctgcttcctc |
| 10381 | cagcccccat ttcacacccc acccaaatca caaggtcctc tgaagtctca gaactccaaa |
| 10441 | ttaacgttgg gatttacgat gtgaatgctg aggagaaaat tgggagttgg tgggagatca |
| 10501 | ccaaattgtc aaaactatga aactcatctg tcttcccaaa tctgacctca gggacttggg |
| 10561 | gggttcactc tggcttctgc cacagtattt tctggggaac caaaggcctc gggaatagag |
| 10621 | aaacaggttg ccggatatcc tggaagtcta agccatactg accagtttgt cttgagtgtt |
| 10681 | ttctttgtga gcctggaact gtccccggac ccctttcttt taaacatggt tcaggacttt |
| 10741 | aaaaaaaagc actgtatttt ttttatgtaa gccaagatgc cctccctagc agagatagcg |
| 10801 | ttgaactgtc tctagttctg tagcctgaga gacttaaatc gtttaacttc agtgtctttg |
| 10861 | tccactctgt tgaactgcta aggattctat tgaatgtgtt ctttgcggct ttggaggagt |
| 10921 | tgctgggtgt gtaagtcctg catccctttg cctggtatgt gtatattatt cctttgcctg |
| 10981 | gctgtgtatc gttcttcagt gtaagtacac ccacactctg tattcctttg cctgctcccc |
| 11041 | gcccccccac acacacacat cctgcatagt tttaaaataa ggcctgagag actgtttcta |
| 11101 | tttcctgtca tagctggtga cttttaacag ttgaggcgaa tggcctgtca cttgcctggg |
| 11161 | ttcccgtcag gggtgatcca tggaactcct cagtggaaca gaatttagga cagaagatcc |
| 11221 | caccttcctt ccaggcctgg ggagaatcag actgtgagat aaaccatgat gctgcccaat |
| 11281 | cccactgccc caccttgctt ttaaaataaa gtgcctccta acgtc |

SEQ ID NO: 59 Mouse ARID1B Amino Acid Sequence (NP_001078824.1)

| | |
|---|---|
| 1 | metgllpnhk lkavgeapaa pphqqhhhhh ahhhhhhhah hlhhlhhhha lqqqlnqfqq |
| 61 | pqppqpqqqq pppppqqqhp tannslggag ggapqpgpdm eqpqhggakd svagnqadpq |
| 121 | gqpllskpgd eddappkmge pagsryehpg lgaqqqpapv avpgggggpa avsefnnyyg |
| 181 | saapasggpg gragpcfdqh ggqqspgmgm mhsasaaaga pssmdplqns hegypnsqyn |
| 241 | hypgysrpga gggggggggg ggsggggggg gaggaggaaa aaagagavaa aaaaaaaaaa |
| 301 | aagggggggy gssssgygvl ssprqqgggm mmgpggggaa slskaaagaa aaaggfqrfa |
| 361 | gqnqhpsgat ptlnqlltsp spmmrsyggs ypdyssssap pppsqpqsqa aagaaaggqq |
| 421 | aaagmglgkd lgaqyaaasp awaaaqqrsh pamspgtpgp tmgrsqgspm dpmvmkrpql |
| 481 | ygmgthphsq pqqsspypgg sygppgaqry plgmqgrapg algglqypqq qmppqygqqa |
| 541 | vsgycqqqqq pyynqqpqps hlppqaqylq paaaqsqqry qpqqdmsqeg ygtrsqppla |
| 601 | pgksnhedln liqqerpssl pdlsgsiddl ptgteatlss avsasgstss qgdqsnpaqs |
| 661 | pfsphasphl ssipggpsps pvgspvgsnq srsgpispas ipgsqmppqp pgsqsesssh |
| 721 | palsqspmpq ergfmtgtqr npqmsqygpq qtgpsmsphp spggqmhpgi snfqqsnssg |
| 781 | tygpqmsqyg pqgnysrtpt ysgvpsasys gpgpgmgina nnqmhgqgpa qpcgamplgr |
| 841 | mpsagmqnrp fpgtmssvtp sspgmsqqgg pgmgppmptv nrkaqeaaaa vmqaaansaq |
| 901 | srqgsfpgmn qsglvasssp ysqsmnnnss lmstqaqpys mtptmvnsst asmgladmms |
| 961 | psesklsvpl kadgkeegvs qpeskskdsy gsqgisqppt pgnlpvpspm spssasissf |
| 1021 | hgdesdsiss pgwpktpssp ksssssttge kitkvyelgn eperklwvdr yltfmeergs |
| 1081 | pvsslpavgk kpldlfrlyv cvkeigglaq vnknkkwrel atnlnvgtss saasslkkqy |
| 1141 | iqylfafeck tergeepppe vfstgdskkq pklqppspan sgslqgpqtp qstgsnsmae |
| 1201 | vpgdlkpptp astphgqmtp mqsgrsstvs vhdpfsdvsd saypkrnsmt pnapyqqgmg |
| 1261 | mpdmmgrmpy epnkdpfsgm rkvpgssepf mtqgqvpnsg mqdmynqsps gamsnlgmgq |
| 1321 | rqqfpygtsy drrheaygqq ypgqgpptgq ppygghqpgl ypqqpnykrh mdgmygppak |
| 1381 | rhegdmynmq ygsqqqemyn qyggsysgpd rrpiqgqypy pynrermqgp gqmqphgipp |
| 1441 | qmmggpmqss ssegpqqnmw atrndmpypy qsrqgpggpa qappypgmnr tddmmvpeqr |
| 1501 | inhesqwpsh vsqrqpymss sasmqpitrp pqssyqtpps lpnhisraps pasfqrsles |
| 1561 | rmspskspfl ptmkmqkvmp tvptsqvtgp ppqpppirre itfppgsvea sqpilkqrrk |
| 1621 | itskdivtpe awrvmmslks gllaestwal dtinillydd stvatfnlsq lsgflellve |
| 1681 | yfrkclidif gilmeyevgd psqkaldhrs gkkddsqsle ddsgkeddda eclveeeeee |
| 1741 | eeeeedseki esegksspal aapdasvdpk etpkqaskfd klpikivkkn klfvvdrsdk |
| 1801 | 1grvqefssg 1lhwqlgggd ttehiqthfe skmeipprrr pppplsstgk kkelegkgds |
| 1861 | eeqpeksiia tiddvlsarp galpedtnpg pqtdsgkfpf giqqakshrn irlledeprs |
| 1921 | rdetplctia hwqdslakrc icvsnivrsl sfvpgndaem skhpglvlil gklillhheh |
| 1981 | perkrapqty ekeededkgv acskdewwwd clevlrdntl vtlanisgql dlsaytesic |
| 2041 | 1pildgllhw mvcpsaeaqd pfptvgpnsv lspqrlvlet lcklsiqdnn vdlilatppf |
| 2101 | srqekfyatl vryvgdrknp vcremsmall snlaqgdtla araiavqkgs ignlisfled |
| 2161 | gvtmaqyqqs qhnlmhmqpp pleppsvdmm craakallam arvdenrsef llhegrlldi |
| 2221 | sisavlnslv asvicdvlfq igql |

SEQ ID NO: 60 Human SMARCC1 cDNA Sequence (NM_003074.3, CDS: 119-
3436)

| | |
|---|---|
| 1 | ctgggcgggg ccgggaagcg gcagtggcgg ctacgcgcgc gggggtgcgc gcgggaacga |
| 61 | ccgggaaaca ccgcgagggc cggggtgggc caggctgtgg ggacgacggg ctgcgacgat |
| 121 | ggccgcagcg gcgggcggcg gcgggccggg gacagcggta ggcgccacgg gctcggggat |
| 181 | tgcggcggca gccgcaggcc tagctgttta tcgacggaag gatgggggcc cggccaccaa |
| 241 | gttttgggag agcccggaga cggtgtccca gctggattcg gtgcgggtct ggctgggcaa |
| 301 | gcactacaag aagtatgttc atgcggatgc tcctaccaat aaaacactgg ctgggctggt |
| 361 | ggtgcagctt cttcagttcc aggaagatgc ctttgggaag catgtcacca acccggcctt |
| 421 | caccaaactc cctgcaaagt gtttcatgga tttcaaagct ggaggcgcct tatgtcacat |
| 481 | tcttggggct gcttacaagt ataaaaatga acagggatgg cggaggtttg acctacagaa |
| 541 | cccatctcga atggatcgta atgtggaaat gtttatgaac attgaaaaaa cattggtgca |
| 601 | gaacaattgt ttgaccagac ccaacatcta cctcattcca gacattgatc tgaagttggc |
| 661 | taacaaattg aaagatatca tcaaacgaca tcagggaaca tttacggatg agaagtcaaa |
| 721 | agcttcccac cacatttacc catattcttc ctcacaagac gatgaagaat ggttgagacc |
| 781 | ggtgatgaga aaagagaagc aagtgttagt gcattggggc ttttacccag acagctatga |
| 841 | tacttgggtc catagtaatg atgttgatgc tgaaattgaa gatccaccaa ttccagaaaa |
| 901 | accatggaag gttcatgtga aatggatttt ggacactgat attttcaatg aatggatgaa |
| 961 | tgaggaggat tatgaggtgg atgaaaatag gaagcctgtg agttttcgtc agcggatttc |
| 1021 | aaccaagaat gaagagccag tcagaagtcc agaaagaaga gatagaaaag catcagctaa |
| 1081 | tgctcgaaag aggaaacatt cgccttcgcc tccccctccg acaccaacag aatcacggaa |
| 1141 | gaagagtggg aagaaaggcc aagctagcct ttatgggaag cgcagaagtc agaaagagga |
| 1201 | agatgagcaa gaagatctaa ccaaggatat ggaagaccca acacctgtac ccaatataga |
| 1261 | agaagtagta cttcccaaaa atgtgaacct aaagaaagat agtgaaaata cacctgttaa |
| 1321 | aggaggaact gtagcggatc tagatgagca ggatgaagaa acagtcacag caggaggaaa |
| 1381 | ggaagatgaa gatcctgcca aaggtgatca gagtcgatca gttgaccttg gggaagataa |
| 1441 | tgtgacagag cagaccaatc acattattat tcctagttat gcatcatggt ttgattataa |
| 1501 | ctgtattcat gtgattgaac ggcgtgctct tcctgagttc ttcaatggaa aaaacaaatc |
| 1561 | caagactcca gaaatatact tggcatatcg aaattttatg attgacacgt atcgtctaaa |
| 1621 | cccccaagag tatttaacta gcactgcttg tcggaggaac ttgactggag atgtgtgtgc |
| 1681 | tgtgatgagg gtccatgcct ttttagagca gtggggactc gttaattacc aagttgaccc |
| 1741 | ggaaagtaga cccatggcaa tgggacctcc tcctactcct cattttaatg tattagctga |
| 1801 | taccccctct gggcttgtgc ctctgcatct tcgatcacct caggttcctg ctgctcaaca |
| 1861 | gatgctaaat tttcctgaga aaaacaagga aaaaccagtt gatttgcaga actttggtct |
| 1921 | ccgtactgac atttactcca agaaaacatt agcaaagagt aaaggtgcta gtgctggaag |
| 1981 | agaatggact gaacaggaga cccttctact cctggaggcc ctggagatgt acaaggatga |
| 2041 | ttggaacaaa gtgtcggaac atgttggaag tcgtactcag gatgaatgca tcctccactt |
| 2101 | tttgagactt cccattgagg acccatacct tgagaattca gatgcttccc ttgggccttt |
| 2161 | ggcctaccag cctgtcccct tcagtcagtc aggaaatcca gttatgagta ctgttgcttt |
| 2221 | tttggcatct gtggtggacc ctcgcgtggc atctgctgca gcaaaagcgg ctttggagga |
| 2281 | gttttctcgg gtccgggagg aggtaccact ggaattggtt gaagctcatg tcaagaaagt |
| 2341 | acaagaagca gcacgagcct ctgggaaagt ggatcccacc tacggtctgg agagcagctg |
| 2401 | cattgcaggc acagggcccg atgagccaga gaagcttgaa ggagctgaag aggaaaaaat |
| 2461 | ggaagccgac cctgatggtc agcagcctga aaaggcagaa aataaagtgg aaaatgaaac |
| 2521 | ggatgaaggt gataaagcac aagatggaga aaatgaaaaa aatagtgaaa aggaacagga |
| 2581 | tagtgaagtg agtgaggata ccaaatcaga agaaaaggag actgaagaga acaaagaact |
| 2641 | cactgataca tgtaaagaaa gagaaagtga tactgggaag aagaaagtag aacatgaaat |
| 2701 | ttccgaagga aatgttgcca cagccgcagc agctgctctt gcctcagcgg ctaccaaagc |
| 2761 | caagcacctg gctgcagtgg aagaaagaaa gatcaagtcc ctggtagctc tcttggttga |
| 2821 | gacacaaatg aagaaactag agatcaaact tcgacatttt gaagagctgg aaactatcat |
| 2881 | ggacagagag aaagaagctc tagaacaaca gaggcagcag ttgcttactg aacgccaaaa |
| 2941 | cttccacatg gaacagctga agtatgctga attacgagca cgacagcaaa tggaacagca |
| 3001 | gcagcatggc cagaaccctc aacaggcaca ccagcactca ggaggacctg gcctggcccc |
| 3061 | acttggagca gcagggcacc ctggcatgat gcctcatcaa cagccccctc cctaccctct |
| 3121 | gatgcaccac cagatgccac cacctcatcc accccagcca ggtcagatac caggcccagg |
| 3181 | ttccatgatg cccgggcagc acatgccagg ccgcatgatt cccactgttg cagccaacat |
| 3241 | ccacccctct gggagtggcc ctacccctcc tggcatgcca ccaatgccag gaaacatctt |
| 3301 | aggaccccgg gtacccctga cagcacctaa cggcatgtat ccccctccac cacagcagca |
| 3361 | gccaccgcca ccaccacctg cagatggggt ccctccgcct cctgctcctg gcccgccagc |
| 3421 | ctcagctgct ccttagcctg gaagatgcag ggaacctcca cgcccaccac catgagctgg |
| 3481 | agtggggatg acaagacttg tgttcctcaa ctttcttggg tttctttcag gatttttctt |
| 3541 | ctcacagctc caagcacgtg tcccgtgcct ccccactcct cttaccaccc ctctctctga |
| 3601 | cactttttgt gttgggtcct cagccaacac tcaaggggaa acctgtagtg acagtgtgcc |
| 3661 | ctggtcatcc ttaaaataac ctgcatctcc cctgtcctgg tgtgggagta agctgacagt |
| 3721 | ttctctgcag gtcctgtcaa ctttagcatg ctatgtcttt accatttttg ctctcttgca |
| 3781 | gttttttgct ttgtcttatg cttctatgga taatgctata taatcattat ctttttatct |
| 3841 | ttctgttatt attgttttaa aggagagcat cctaagttaa taggaaccaa aaaataatga |
| 3901 | tgggcagaag ggggggaata gccacagggg acaaacctta aggcattata agtgacctta |
| 3961 | tttctgcttt tctgagctaa gaatggtgct gatggtaaag tttgagactt ttgccacaca |
| 4021 | caaatttgtg aaaattaaac gagatgtgga aggagaacct cagtgatttt attccctagt |
| 4081 | gaggcctctg agggcctcca cactgcctgg cagaacatac cactgaacta gtatgtgcta |
| 4141 | gaggagggca caaacatccg ctccttccct aggcctgctg gctctggttt tctatgcaga |
| 4201 | tgattcattg gattgggggt gagtgttttg tttttctggg ggcagtgtga gctttgaggg |
| 4261 | ttggaatatt gggaggcatt ccttagtttc ctcaactagc ctggaaagtt aggagtctag |
| 4321 | ggtaattacc cccaatgagt ctagcctact attcactgct ttgtgtgcat ttttttctcc |
| 4381 | ctctttaaaa aaccctttaa aagaaaaaaa aaagtagata gtgctaaata ttttagctca |
| 4441 | tgaaacttgg ttaggatggc tgggggtaca agtccccaaa ctacctcttg ttacagtagc |
| 4501 | cagggagtgg aatttcgtca accggtactt ttaaggttag gatgggacgg gaaaagtgaa |
| 4561 | gcaggatatt agctccttat accttctccc ttccatttct gagatctcac attccatcta |
| 4621 | tcacagggtt ttcaaagaga tgctgagggt aacaaggaac tcacttggca gtcagagcat |
| 4681 | catgctttga ggtttggggt gctcaggctg ggagggtaga atgccattcc agaggacaag |
| 4741 | ccacaaaaat gccttaattt gagctcgtat ttacccctgc tgataagtga cttgagagtt |
| 4801 | cccggttttt tcctcttgtc cttccctccc ttctgtcctt ccatgtgtgg ggaaagggtg |
| 4861 | tttttggtag agcttggttt ccaaagcgcc tggctttctc acttcacatt ctcaagtggc |
| 4921 | agtttcatta tttagaatgc aaggtggaca tcttttggat atctttttct atatattttc |
| 4981 | taaagcttta catatgagag ggtataggga ggtgtttata aaacacttga gaactttttt |
| 5041 | ccttaatatc agaaagcaaa aaaataaaac cacaattgag atttgccttt caaaccctca |
| 5101 | ggtttgcctc taaccaggtg tccctggtca ccatcagagt actggaatac gggaaccgag |
| 5161 | gagaccttgg tccttttgtt tttgttctgg actcttggga gtggaaatga gaatgagttt |
| 5221 | attcctactg gagcttagtt ccaatgcatt tggctccaga aagaccccag tgccttttga |
| 5281 | caatggccag ggttttacct acttcctgcc agtctttccc aaaggaaact cattccaaat |
| 5341 | acttcttttt tcccctggag tccgagaagg aaaatggaat tctggttcat actgtggtcc |
| 5401 | cttgtaacct caggtcttta atgtgatcac tttcaaattt aaaagatcca ggtggaaata |
| 5461 | tttttactat agtaataatt ctacaaaata cctgaattct taacactgtt atatttcagt |
| 5521 | ataagtggtg gctttttctt ttcatgtctt tgatctggtt ttattcctgt aattcagcca |
| 5581 | cctgattttg tgaggggggg gaataatatg tggtttttgt acaaacatgt ttctcagtgt |
| 5641 | gttgttattt tggaaaaaat gaggggaggg agtttggcaa gaatggagaa aatgaatgaa |
| 5701 | gaaggcctaa tctctctctt tttcagtgaa taaatggaac accatttctg gattctaaaa |
| 5761 | aaaaaaaaaa aaaaaaaaaa |

SEQ ID NO: 61 Human SMARCC1 Amino Acid Sequence (NP_003065.3)

| | |
|---|---|
| 1 | maaaaggggp gtavgatgsg iaaaaaglav yrrkdggpat kfwespetvs qldsvrvwlg |
| 61 | khykkyvhad aptnktlagl vvqllqfqed afgkhvtnpa ftklpakcfm dfkaggalch |
| 121 | ilgaaykykn eqgwrrfdlq npsrmdrnve mfmniektlv qnncltrpni ylipdidlkl |
| 181 | anklkdiikr hqgtftdeks kashhiypys ssqddeewlr pvmrkekqvl vhwgfypdsy |
| 241 | dtwvhsndvd aeiedppipe kpwkvhvkwi ldtdifnewm needyevden rkpvsfrqri |
| 301 | stkneepvrs perrdrkasa narkrkhsps pppptptesr kksgkkgqas lygkrrsqke |
| 361 | edeqedltkd medptpvpni eevvlpknvn 1kkdsentpv kggtvadlde qdeetvtagg |
| 421 | kededpakgd qsrsvdlged nvteqtnhii ipsyaswfdy ncihvierra lpeffngknk |
| 481 | sktpeiylay rnfmidtyrl npqeyltsta crrnltgdvc avmrvhafle qwglvnyqvd |
| 541 | pesrpmamgp pptphfnvla dtpsglvplh lrspqvpaaq qmlnfpeknk ekpvdlqnfg |
| 601 | lrtdiyskkt lakskgasag rewteqetll llealemykd dwnkvsehvg srtqdecilh |
| 661 | flrlpiedpy lensdaslgp layqpvpfsq sgnpvmstva flasvvdprv asaaakaale |
| 721 | efsrvreevp lelveahvkk vqeaarasgk vdptygless ciagtgpdep eklegaeeek |
| 781 | meadpdgqqp ekaenkvene tdegdkaqdg eneknsekeq dsevsedtks eeketeenke |
| 841 | ltdtckeres dtgkkkvehe isegnvataa aaalasaatk akhlaaveer kikslvallv |
| 901 | etqmkkleik lrhfeeleti mdrekealeq qrqqllterq nfhmeqlkya elrarqqmeq |
| 961 | qqhgqnpqqa hqhsggpgla plgaaghpgm mphqqpppyp 1mhhqmppph ppqpgqipgp |
| 1021 | gsmmpgqhmp grmiptvaan ihpsgsgptp pgmppmpgni lgprvpltap ngmyppppqq |
| 1081 | qppppppadg vppppapgpp asap |

SEQ ID NO: 62 Mouse SMARCC1 cDNA Sequence (NM_009211.2, CDS: 94-3408)

| | |
|---|---|
| 1 | ggaggtggca tctgcgcgcg cgcgcgcggg tgcgaacggg aaacgccgcg agggccaggc |
| 61 | taggccgggc ggtagacacg acggacggtg actatggccg cgacagcggg tggcggtccg |
| 121 | ggagcagcag caggcgccgt gggtgcaggg ggtgcggcgg cggcctccgg gctggccgtg |
| 181 | taccggagga aggacggggg cccggccagc aagttttggg agagcccgga cacggtgtcc |
| 241 | cagctagatt cggtgcgagt ctggctgggc aagcactaca agaagtatgt tcatgcagat |
| 301 | gctcctacca ataaaacact agctggactg gtggtgcagc ttctacagtt ccaagaagat |
| 361 | gcctttggga agcatgtcac caacccagct ttcaccaaac tacctgcaaa atgtttcatg |
| 421 | gatttcaaag ctggaggcac cttgtgtcac attcttgggg cagcttacaa gtacaaaaat |
| 481 | gaacagggct ggcggagatt tgatcttcag aacccatccc gaatggatcg taacgttgaa |
| 541 | atgttcatga acattgagaa aacattggta cagaacaact gtctgactag accaaacatc |
| 601 | tacctcattc cagacattga tttgaagttg gctaacaagt tgaaagatat catcaaacgg |
| 661 | catcagggga catttactga tgagaagtca aaagcttccc accatattta tccatatcct |
| 721 | tcctcacaag aggatgagga gtggctgaga ccagtgatga ggagagacaa gcaggtgctg |
| 781 | gtgcactggg gtttctaccc agacagctat gacacttggg tccacagtaa tgatgttgat |
| 841 | gctgaaattg aagatgcacc aatcccagaa aagccctgga aggttcatgt aaaatggatt |
| 901 | ttggacactg acgttttcaa tgaatggatg aatgaagagg attatgaagt ggatgagaac |
| 961 | agaaagccag tgagctttcg tcaacgaatt tcaacaaaga atgaagagcc agtcagaagt |
| 1021 | ccagaaagga gagacagaaa agcctctgcc aactctagga agaggaaacc ttccccttct |
| 1081 | cctcctcctc ccacagccac agagtcccgc aagaagagcg ggaagaaagg acaagctagc |
| 1141 | ctttatggga aacgtagaag tcagaaggaa gaagatgagc aagaagatct taccaaggac |
| 1201 | atggaagacc ccacacctgt acctaacata gaggaagtgg ttctccctaa gaatgtaaac |
| 1261 | ccaaagaagg acagtgaaaa cacacccgtt aaaggaggca cggtggcaga tctagatgag |
| 1321 | caggatgaag aagcagttac aacaggagga aaggaagatg aagatcccag caaaggtgat |
| 1381 | ccaagtcgct cagttgaccc aggtgaagac aacgtgacag aacagaccaa tcacatcatt |
| 1441 | attcccagct acgcatcctg gtttgattat aattgtattc atgtcattga acggcgtgcg |
| 1501 | cttcctgagt tctttaatgg aaaaaacaaa tccaagaccc ctgaaatata cttggcatat |
| 1561 | cgaaatttta tgattgacac ataccgtcta aaccctcaag aatatttaac cagcactgct |
| 1621 | tgccggcgaa acctgactgg agatgtgtgt gctgtgatga gggttcatgc cttcttagag |
| 1681 | cagtggggtc ttgttaacta ccaagttgac ccagagagtc gacccatggc aatgggacct |
| 1741 | cctcccactc ctcacttcaa tgtgttagct gacacaccct ctgggcttgt gcccctgcat |
| 1801 | cttcgatcac ctcaggtccc tgccgctcaa cagatgttaa attttcctga gaagaacaag |
| 1861 | gaaaaaccaa ttgatttgca gaactttggt cttcgaactg acatttactc caagaaaaca |
| 1921 | ctggcaaaga gtaaaggtgc tagtgctgga agggagtgga cagaacagga gacccttctt |
| 1981 | ctcctagagg ctctggagat gtacaaggac gattggaata aagtgtcaga acatgttgga |
| 2041 | agccgtactc aggacgaatg catcctccac tttctgaggc ttcccattga ggacccttac |
| 2101 | cttgaaaatt cagatgcttc tcttgggcca ctggcttacc agcctgtccc tttcagccag |
| 2161 | tcgggaaacc cggtgatgag cactgttgcc tttttagcat ctgtcgttga cccccgtgta |
| 2221 | gcatctgctg cagcaaaagc agcgttggag gagttttctc gtgtccgaga agaagtaccc |
| 2281 | ctggaattgg ttgaagcaca tgtcaagaaa gtacaggaag ctgcaagagc ctctgggaag |
| 2341 | gtggacccca cctatggctt ggagagcagc tgtattgctg gcacagggcc tgacgagcca |
| 2401 | gagaagcttg aaggatctga agaagagaag atggaaacag atcctgatgg tcagcagcct |
| 2461 | gaaaaggcag aaaacaaagt ggaaaatgaa tcggatgaag gtgataaaat acaagatcga |
| 2521 | gagaatgaaa aaaacactga gaaggaacaa gatagtgacg tcagtgagga tgtcaagcca |
| 2581 | gaagaaaagg agaatgaaga gaacaaagag ctcactgata catgtaaaga aagagaaagc |
| 2641 | gatgccggga agaagaaagt ggaacacgag atttcggaag gaaacgttgc cacagccgca |
| 2701 | gcagctgctc tggcctcagc tgctactaaa gccaagcacc tggcggctgt tgaagaaaga |
| 2761 | aaaatcaagt ccttggtagc tctcttggtt gaaacacaaa tgaagaaact agagatcaaa |
| 2821 | cttcgacatt ttgaagagct ggagactata atggacagag agaaagaggc tctagaacaa |
| 2881 | cagagacagc agttgcttac tgagcgtcag aacttccaca tggaacagtt gaaatatgct |
| 2941 | gaactacgtg cccggcagca aatggagcag cagcagcagc atggccagac acctcagcag |
| 3001 | gcgcaccagc acacgggagg gccggggatg gccccacttg gagccacagg ccaccctggc |
| 3061 | atgatgccgc atcagcagcc ccctccctac ccactgatgc accatcagat gccgccaccc |
| 3121 | catcctcccc aaccaggtca aataccaggc cctggctcca tgatgcctgg ccagcccatg |
| 3181 | ccaggtcgca tgatccccgc tgtggcagcc aacattcacc ctactgggag tggccctacc |
| 3241 | cctcctggta tgcctccaat gcccggaaac atcttaggac cccgggtacc cctcacagca |
| 3301 | ccaaacggca tgtatcctcc tccaccacag cagcagcagc cgcctcctcc tgcagatggg |
| 3361 | gtccctccac ctcctgctcc aggcccaccc gcctcggcca ctccctagcc tggaagatac |
| 3421 | aagagcctcc acagccacca caagcaggaa tggggatggc aggacttgtg tctcggcttc |
| 3481 | cttggttttc ttgcaggatt tttttttcac aaccccaagc acaagcccca tgtctctcca |
| 3541 | ctccttgata cttcttgtgt caggtcctta gttgacactc attgggaagc ctgtggtgac |
| 3601 | tgatgtgctc tggtcattta aaaagtacca tgtgtctccc ctgtccccgt gtgacagatg |
| 3661 | ttggcaggtg gtctgcaggt cctgttgtgt tgacattagt attctttgtg tgtatctctc |
| 3721 | tctgtctctc tctctctgct ttgtctaagg cttcaatgta taatcctcta taattattgt |
| 3781 | cctttcttcc tttgtaatgg ttgttttttt aaggaaagta tcctaagtta atagaaacca |
| 3841 | aaaaaaatgg taatgggcag aaagagatag ccacagaggg acacacctta aggcattata |
| 3901 | agtgacctta tttctgctta tctgagctag agtggtgcta ctgatagagt ccctgagact |
| 3961 | tgtcacacat aagtgcacca agatgagaag agctggggaa agggggtatc ctttcgattt |
| 4021 | gatttcctgg tgaggaccat gaaggacttc cctgtgcctg gaagaacatg ccactgtacc |
| 4081 | tagtacacga tagatagcaa agagcacagc tttacaacaa gcccttccta ccttctcccg |
| 4141 | ccattctggt tgtctgtgca gaagatttgc aggattggaa catggtggtt gttttcccaa |
| 4201 | gggcagcgtg agctttcaga gttggggttt tcccagtcta acaaagataa agggtctggg |
| 4261 | gccctaccta caaaccttta ggaacccttc caaacctccc aaccttcccc aaacacatag |
| 4321 | ggcctaccct cgccacccca ataaacatta catgtttttt aaaccttcct ataagaaagg |
| 4381 | aaaaaaatgt aaaatgggtt atagattatg ttgaacattt tatctcatgc ggcttggtgg |
| 4441 | gggtgggggt acagatccct aaactacctc ttgctgtagc cagggtgagc ggggttctta |
| 4501 | agcggtactg aggtgcagaa cgggagtggg aatgctcaca tgtgatgagc agcctcctgt |
| 4561 | acctcacatt ctgagacctc acattccatc tgttgtcaca gggttatgga gactgtgcta |
| 4621 | atggcacaag gacctcactt ggctccagag tgcgaggctg taaggtttaa gtgccatccc |
| 4681 | agaggaattg ccaccaaaaa aaaaaaaaaa agccttaatc tgagcctgta tctacccctg |
| 4741 | ctgatgaaca actagatggg ttttggtttt gccagcttct ttcctccctc cctccctccc |
| 4801 | tccctccctc cctccctcct ttctgtcttt ccattagtag caaaagggtg tttttagcag |
| 4861 | aactttaagt ggcagtttca ttcttgagag tgcaaggtag agcaccttac gggtgtattt |
| 4921 | ttatgtgtat tttaaagctt tatgtatgag agctataggt aggcatttct taataacaca |
| 4981 | aaaacctaca gttgagattt gcctttaaga ctcttggttt tcctctaacc aggagcccac |
| 5041 | gtcaccgcca gagtcctgga gctagagcta atgactccag agccttgggg tggaaatgga |
| 5101 | gattcgctta ttccctgggt gcttgttttt cctccaggaa aaccccggtg tcttctgacc |
| 5161 | gcagccaggg ttgccctcct tccctccatt ctctcccaaa gtaaattgac tccagcactt |
| 5221 | gccttctccc cggagtccta ggggaggtat aggactctgc ttgtctgtaa cctgaggtct |
| 5281 | gtaatgtgat tgctttccag ttttgagaga tgcaagtggg aatagttttt acattgttga |
| 5341 | taatctatag aacctaagtt caacacttca acacagctct ttccatgact gtcagttagg |
| 5401 | tatcattcct gtaataacac ccatccagtt ttgtgagggg cgggcttgga tactgtgtgg |
| 5461 | tttttgtaca aatgtgtttc tcagtgtggg tttttgtttt ttgttgggtt tttttttttt |
| 5521 | ttttggtgtt tttttgtttg tttatttgtt ttttttcttt aggttttgtt ctaatgaggt |
| 5581 | aaaggagctt tgagagtttg ggagaaaatg aatgaaagtg gcttaatgtc cctcgtttgc |
| 5641 | attgaataaa tgaaatacca tttatgaatt ctaaaaaaaa aaaa |

SEQ ID NO: 63 Mouse SMARCC1 Amino Acid Sequence (NP_033237.2)

| | |
|---|---|
| 1 | maatagggpg aaagavgagg aaaasglavy rrkdggpask fwespdtvsq ldsvrvwlgk |
| 61 | hykkyvhada ptnktlaglv vqllqfqeda fgkhvtnpaf tklpakcfmd fkaggtlchi |
| 121 | lgaaykykne qgwrrfdlqn psrmdrnvem fmniektlvq nncltrpniy lipdidlkla |
| 181 | nklkdiikrh qgtftdeksk ashhiypyps sqedeewlrp vmrrdkqvlv hwgfypdsyd |
| 241 | twvhsndvda eiedapipek pwkvhvkwil dtdvfnewmn eedyevdenr kpvsfrqris |
| 301 | tkneepvrsp errdrkasan srkrkpspsp ppptatesrk ksgkkgqasl ygkrrsqkee |
| 361 | deqedltkdm edptpvpnie evvlpknvnp kkdsentpvk ggtvadldeq deeavttggk |
| 421 | ededpskgdp srsvdpgedn vteqtnhiii psyaswfdyn cihvierral peffngknks |
| 481 | ktpeiylayr nfmidtyrln pqeyltstac rrnltgdvca vmrvhafleq wglvnyqvdp |
| 541 | esrpmamgpp ptphfnvlad tpsglvplhl rspqvpaaqq mlnfpeknke kpidlqnfgl |
| 601 | rtdiyskktl akskgasagr ewteqetlll lealemykdd wnkvsehvgs rtqdecilhf |
| 661 | lrlpiedpyl ensdaslgpl ayqpvpfsqs gnpvmstvaf lasvvdprva saaakaalee |
| 721 | fsrvreevpl elveahvkkv qeaarasgkv dptyglessc iagtgpdepe klegseeekm |
| 781 | etdpdgqqpe kaenkvenes degdkiqdre nekntekeqd sdvsedvkpe ekeneenkel |
| 841 | tdtckeresd agkkkvehei segnvataaa aalasaatka khlaaveerk ikslvallve |
| 901 | tqmkkleikl rhfeeletim drekealeqq rqqllterqn fhmeqlkyae lrarqqmeqq |
| 961 | qqhgqtpqqa hqhtggpgma plgatghpgm mphqqpppyp 1mhhqmppph ppqpgqipgp |
| 1021 | gsmmpgqpmp grmipavaan ihptgsgptp pgmppmpgni lgprvpltap ngmyppppqq |
| 1081 | qqppppadgv ppppapgppa satp |

SEQ ID NO: 64 Human SMARCC2 cDNA Sequence Variant 1 (NM_003075.4,
CDS: 114-3758)

| | |
|---|---|
| 1 | ggaggcggcg gccgcggcgg cgggaggcgg cgggaggcgg gcggaggagg aggcggagga |
| 61 | ggcgggagct gagctgagtg gggcgggcgg cggcggggcc cgagccggag aagatggcgg |
| 121 | tgcggaagaa ggacggcggc cccaacgtga agtactacga ggccgcggac accgtgaccc |
| 181 | agttcgacaa cgtgcggctg tggctcggca agaactacaa gaagtatata caagctgaac |
| 241 | cacccaccaa caagtccctg tctagcctgg ttgtacagtt gctacaattt caggaagaag |
| 301 | tttttggcaa acatgtcagc aatgcaccgc tcactaaact gccgatcaaa tgtttcctag |
| 361 | atttcaaagc gggaggctcc ttgtgccaca ttcttgcagc tgcctacaaa ttcaagagtg |
| 421 | accagggatg gcggcgttac gatttccaga atccatcacg catggaccgc aatgtggaaa |
| 481 | tgtttatgac cattgagaag tccttggtgc agaataattg cctgtctcga cctaacattt |
| 541 | ttctgtgccc agaaattgag cccaaactac tagggaaatt aaaggacatt atcaagagac |
| 601 | accagggaac agtcactgag gataagaaca atgcctccca tgttgtgtat cctgtcccgg |
| 661 | ggaatctaga agaagaggaa tgggtacgac cagtcatgaa gagggataag caggttcttc |
| 721 | tgcactgggg ctactatcct gacagttacg acacgtggat cccagcgagt gaaattgagg |
| 781 | catctgtgga agatgctcca actcctgaga aacctaggaa ggttcatgca aagtggatcc |
| 841 | tggacaccga caccttcaat gaatggatga atgaggaaga ctatgaagta aatgatgaca |
| 901 | aaaaccctgt ctcccgccga aagaagattt cagccaagac actgacagat gaggtgaaca |
| 961 | gcccagattc agatcgacgg gacaagaagg ggggaaacta taagaagagg aagcgctccc |
| 1021 | cctctccttc accaacccca gaagcaaaga agaaaaatgc taagaaaggt ccctcaacac |
| 1081 | cttacactaa gtcaaagcgt ggccacagag aagaggagca agaagacctg acaaaggaca |
| 1141 | tggacgagcc ctcaccagtc cccaatgtag aagaggtgac acttcccaaa acagtcaaca |
| 1201 | caaagaaaga ctcagagtcg gccccagtca aaggcggcac catgaccgac ctggatgaac |
| 1261 | aggaagatga aagcatggag acgacgggca aggatgagga tgagaacagt acggggaaca |
| 1321 | agggagagca gaccaagaat ccagacctgc atgaggacaa tgtgactgaa cagacccacc |
| 1381 | acatcatcat tcccagctac gctgcctggt ttgactacaa tagtgttcat gccattgagc |
| 1441 | ggagggctct ccccgagttc ttcaacggca agaacaagtc caagactcca gagatctacc |
| 1501 | tggcctatcg aaactttatg attgacactt accgactgaa cccccaagag tatcttacct |
| 1561 | ctaccgcctg ccgccgaaac ctagcgggtg atgtctgtgc catcatgagg gtccatgcct |
| 1621 | tcctagaaca gtggggtctt attaactacc aggtggatgc tgagagtcga ccaaccccaa |
| 1681 | tggggcctcc gcctacctct cacttccatg tcttggctga cacaccatca gggctggtgc |
| 1741 | ctctgcagcc caagacacct cagcagacct ctgcttccca acaaatgctc aactttcctg |
| 1801 | acaaaggcaa agagaaacca acagacatgc aaaactttgg gctgcgcaca gacatgtaca |
| 1861 | caaaaaagaa tgttccctcc aagagcaagg ctgcagccag tgccactcgt gagtggacag |
| 1921 | aacaggaaac cctgcttctc ctggaggcac tggaaatgta caaagatgac tggaacaaag |
| 1981 | tgtccgagca tgtgggaagc cgcacacagg acgagtgcat cttgcatttt cttcgtcttc |
| 2041 | ccattgaaga cccatacctg gaggactcag aggcctccct aggccccctg gcctaccaac |
| 2101 | ccatcccctt cagtcagtcg ggcaaccctg ttatgagcac tgttgccttc ctggcctctg |
| 2161 | tcgtcgatcc ccgagtcgcc tctgctgctg caaagtcagc cctagaggag ttctccaaaa |
| 2221 | tgaaggaaga ggtacccacg gccttggtgg aggcccatgt tcgaaaagtg gaagaagcag |
| 2281 | ccaaagtaac aggcaaggcg gaccctgcct tcggtctgga aagcagtggc attgcaggaa |
| 2341 | ccacctctga tgagcctgag cggattgagg agagcgggaa tgacgaggct cgggtggaag |
| 2401 | gccaggccac agatgagaag aaggagccca aggaaccccg agaaggaggg ggtgctatag |
| 2461 | aggaggaagc aaaagagaaa accagcgagg ctcccaagaa ggatgaggag aaagggaaag |
| 2521 | aaggcgacag tgagaaggag tccgagaaga gtgatggaga cccaatagtc gatcctgaga |
| 2581 | aggagaagga gccaaaggaa gggcaggagg aagtgctgaa ggaagtggtg gagtctgagg |
| 2641 | gggaaaggaa gacaaaggtg gagcgggaca ttggcgaggg caacctctcc accgctgctg |
| 2701 | ccgccgccct ggccgccgcc gcagtgaaag ctaagcactt ggctgctgtt gaggaaagga |
| 2761 | agatcaaatc tttggtggcc ctgctggtgg agacccagat gaaaaagttg gagatcaaac |
| 2821 | ttcggcactt tgaggagctg gagactatca tggaccggga gcgagaagca ctggagtatc |
| 2881 | agaggcagca gctcctggcc gacagacaag ccttccacat ggagcagctg aagtatgcgg |
| 2941 | agatgagggc tcggcagcag cacttccaac agatgcacca acagcagcag cagccaccac |
| 3001 | cagccctgcc cccaggctcc cagcctatcc ccccaacagg ggctgctggg ccacccgcag |
| 3061 | tccatggctt ggctgtggct ccagcctctg tagtccctgc tcctgctggc agtggggccc |
| 3121 | ctccaggaag tttgggccct tctgaacaga ttgggcaggc agggtcaact gcagggccac |
| 3181 | agcagcagca accagctgga gccccccagc ctggggcagt cccaccaggg gttccccccc |
| 3241 | ctggacccca tggcccctca ccgttcccca accaacaaac tcctccctca atgatgccag |
| 3301 | gggcagtgcc aggcagcggg cacccaggcg tggcgggtaa tgctcctttg ggtttgcctt |
| 3361 | ttggcatgcc gcctcctcct cctcctcctg ctccatccat catcccattt ggtagtctag |
| 3421 | ctgactccat cagtattaac ctccccgctc ctcctaacct gcatgggcat caccaccatc |
| 3481 | tcccgttcgc cccgggcact ctccccccac ctaacctgcc tgtgtccatg gcgaaccctc |
| 3541 | tacatcctaa cctgccggcg accaccacca tgccatcttc cttgcctctc gggccggggc |
| 3601 | tcggatccgc cgcagcccaa agccctgcca ttgtggcagc tgttcagggc aacctcctgc |
| 3661 | ccagtgccag cccactgcca gacccaggca cccccctgcc tccagacccc acagccccga |
| 3721 | gcccaggcac ggtcacccct gtgccacctc cacagtgagg agccagccag acatctctcc |
| 3781 | ccctcacccc ctgtggacat cacggttcca ggaacagccc ttcccccacc actgggaccc |
| 3841 | tccccagcct ggagagttca tcactacgta aggaaagctc cttccgcccc tccaaagccc |
| 3901 | tcaccatgcc taacagaggc atgcattttt atatcagatt attcaaggac ttctgtttaa |
| 3961 | aagatgttta taatgtctgg gagagaggat aggatgggaa tgctgcccta aaggaagggc |
| 4021 | tggtgaaagg tgtttataca aggttctatt aaccacttct aagggtacac ctccctccaa |
| 4081 | actactgcat tttctatgga ttaaaaaaaa aaaaaaaaag tagattttaa aaagccacat |
| 4141 | tggagctccc ttctacccac taaaaaataa ccaattttta cattttttga gggggagtga |
| 4201 | gttttaggaa aggggaatta agattccagg gagagctctg gggatagaac agggcgcaga |
| 4261 | ttccatctct ccccaagccc ctttttagtg actaagtcaa ggccccaact cccctccccc |
| 4321 | accctacgct gagcttattc gagttcattc gtactaataa tccctcctgc ggcttcctca |
| 4381 | ttgttgctgt tttaggccac cccagctcag ccaatgattc ctttccctct gaatgtcagt |
| 4441 | tttgttttta aaagtcactt gcttagttga tgtcagcgta tgtgtatttg gtggggaaaa |
| 4501 | cctaatttcg gggatttctg tggtaggtaa taggagaaga aagggcactg ggggctgttc |
| 4561 | tccttccttc cctgggctgt atccatggac tcctggaagg cacagagaag ggagctataa |
| 4621 | gaggatgtga agttttaaaa cctgaaattg ttttttaaag cacttaagca cctccatatt |
| 4681 | atgacttggt gggtcacccc ttagcttcct ccctctccca ccaagactat gagaacttca |
| 4741 | gctgatagct gggggctccc cagatgagga tgcagggatt tgggagcagt ggaagagggt |
| 4801 | gcccaacctt gggttggacc aacccttggc tcgcagctca actctgcttc ccgcattcct |
| 4861 | gctccacgtg tcccagcttc tcccctgtga cgggaaggca ggtgtgactc caggctctgc |
| 4921 | actggttctt cttggttcct cccaccaggc cctttgttcc tcatgtcccc atgtttctct |
| 4981 | ccctctgcgt cttagcacct ttcttctgtt caaagttttc tgtaaatttt ctcttttttt |
| 5041 | ctttctttct tttttttttt tttataaatt aatttgcttt cagttccaaa aaaaaaaaaa |
| 5101 | aaaaaa |

SEQ ID NO: 65 Human SMARCC2 Amino Acid Sequence Isoform A
(NP_003066.2)

| | |
|---|---|
| 1 | mavrkkdggp nvkyyeaadt vtqfdnvrlw lgknykkyiq aepptnksls slvvqllqfq |
| 61 | eevfgkhvsn apltklpikc fldfkaggsl chilaaaykf ksdqgwrryd fqnpsrmdrn |
| 121 | vemfmtieks lvqnnclsrp niflcpeiep kllgklkdii krhqgtvted knnashvvyp |
| 181 | vpgnleeeew vrpvmkrdkq vllhwgyypd sydtwipase ieasvedapt pekprkvhak |
| 241 | wildtdtfne wmneedyevn ddknpvsrrk kisaktltde vnspdsdrrd kkggnykkrk |
| 301 | rspspsptpe akkknakkgp stpytkskrg hreeeqedlt kdmdepspvp nveevtlpkt |
| 361 | vntkkdsesa pvkggtmtdl deqedesmet tgkdedenst gnkgeqtknp dlhednvteq |
| 421 | thhiiipsya awfdynsvha ierralpeff ngknksktpe iylayrnfmi dtyrlnpqey |
| 481 | ltstacrrnl agdvcaimrv hafleqwgli nyqvdaesrp tpmgppptsh fhvladtpsg |
| 541 | lvplqpktpq qtsasqqmln fpdkgkekpt dmqnfglrtd mytkknvpsk skaaasatre |
| 601 | wteqetllll ealemykddw nkvsehvgsr tqdecilhfl rlpiedpyle dseaslgpla |
| 661 | yqpipfsqsg npvmstvafl asvvdprvas aaaksaleef skmkeevpta lveahvrkve |
| 721 | eaakvtgkad pafglessgi agttsdeper ieesgndear vegqatdekk epkepreggg |
| 781 | aieeeakekt seapkkdeek gkegdsekes eksdgdpivd pekekepkeg qeevlkevve |
| 841 | segerktkve rdigegnlst aaaaalaaaa vkakhlaave erkikslval lvetqmkkle |
| 901 | iklrhfeele timdrereal eyqrqqllad rqafhmeqlk yaemrarqqh fqqmhqqqqq |
| 961 | pppalppgsq pipptgaagp pavhglavap asvvpapags gappgslgps eqigqagsta |
| 1021 | gpqqqqpaga pqpgavppgv pppgphgpsp fpnqqtppsm mpgavpgsgh pgvagnaplg |
| 1081 | lpfgmppppp ppapsiipfg sladsisinl pappnlhghh hhlpfapgtl pppnlpvsma |
| 1141 | nplhpnlpat ttmpsslplg pglgsaaaqs paivaavqgn llpsasplpd pgtplppdpt |
| 1201 | apspgtvtpv pppq |

SEQ ID NO: 66 Human SMARCC2 cDNA Sequence Variant 2 (NM_139067.3,
CDS: 114-3506)

| | |
|---|---|
| 1 | ggaggcggcg gccgcggcgg cgggaggcgg cgggaggcgg gcggaggagg aggcggagga |
| 61 | ggcgggagct gagctgagtg gggcgggcgg cggcggggcc cgagccggag aagatggcgg |
| 121 | tgcggaagaa ggacggcggc cccaacgtga agtactacga ggccgcggac accgtgaccc |
| 181 | agttcgacaa cgtgcggctg tggctcggca agaactacaa gaagtatata caagctgaac |
| 241 | cacccaccaa caagtccctg tctagcctgg ttgtacagtt gctacaattt caggaagaag |
| 301 | tttttggcaa acatgtcagc aatgcaccgc tcactaaact gccgatcaaa tgtttcctag |
| 361 | atttcaaagc gggaggctcc ttgtgccaca ttcttgcagc tgcctacaaa ttcaagagtg |
| 421 | accagggatg gcggcgttac gatttccaga atccatcacg catggaccgc aatgtggaaa |
| 481 | tgtttatgac cattgagaag tccttggtgc agaataattg cctgtctcga cctaacattt |
| 541 | ttctgtgccc agaaattgag cccaaactac tagggaaatt aaaggacatt atcaagagac |
| 601 | accagggaac agtcactgag gataagaaca atgcctccca tgttgtgtat cctgtcccgg |
| 661 | ggaatctaga agaagaggaa tgggtacgac cagtcatgaa gagggataag caggttcttc |
| 721 | tgcactgggg ctactatcct gacagttacg acacgtggat cccagcgagt gaaattgagg |
| 781 | catctgtgga agatgctcca actcctgaga aacctaggaa ggttcatgca aagtggatcc |
| 841 | tggacaccga caccttcaat gaatggatga atgaggaaga ctatgaagta aatgatgaca |
| 901 | aaaaccctgt ctcccgccga aagaagattt cagccaagac actgacagat gaggtgaaca |
| 961 | gcccagattc agatcgacgg gacaagaagg ggggaaacta taagaagagg aagcgctccc |
| 1021 | cctctccttc accaacccca gaagcaaaga agaaaaatgc taagaaaggt ccctcaacac |
| 1081 | cttacactaa gtcaaagcgt ggccacagag aagaggagca agaagacctg acaaaggaca |
| 1141 | tggacgagcc ctcaccagtc cccaatgtag aagaggtgac acttcccaaa acagtcaaca |
| 1201 | caaagaaaga ctcagagtcg gccccagtca aaggcggcac catgaccgac ctggatgaac |
| 1261 | aggaagatga aagcatggag acgacgggca aggatgagga tgagaacagt acggggaaca |
| 1321 | agggagagca gaccaagaat ccagacctgc atgaggacaa tgtgactgaa cagacccacc |
| 1381 | acatcatcat tcccagctac gctgcctggt ttgactacaa tagtgttcat gccattgagc |
| 1441 | ggagggctct ccccgagttc ttcaacggca agaacaagtc caagactcca gagatctacc |
| 1501 | tggcctatcg aaactttatg attgacactt accgactgaa cccccaagag tatcttacct |
| 1561 | ctaccgcctg ccgccgaaac ctagcgggtg atgtctgtgc catcatgagg gtccatgcct |
| 1621 | tcctagaaca gtggggtctt attaactacc aggtggatgc tgagagtcga ccaaccccaa |
| 1681 | tggggcctcc gcctacctct cacttccatg tcttggctga cacaccatca gggctggtgc |
| 1741 | ctctgcagcc caagacacct cagggccgcc aggttgatgc tgataccaag gctgggcgaa |
| 1801 | agggcaaaga gctggatgac ctggtgccag agacggctaa gggcaagcca gagctgcaga |
| 1861 | cctctgcttc ccaacaaatg ctcaactttc ctgacaaagg caaagagaaa ccaacagaca |
| 1921 | tgcaaaactt tgggctgcgc acagacatgt acacaaaaaa gaatgttccc tccaagagca |
| 1981 | aggctgcagc cagtgccact cgtgagtgga cagaacagga aaccctgctt ctcctggagg |
| 2041 | cactggaaat gtacaaagat gactggaaca aagtgtccga gcatgtggga agccgcacac |
| 2101 | aggacgagtg catcttgcat tttcttcgtc ttcccattga agacccatac ctggaggact |
| 2161 | cagaggcctc cctaggcccc ctggcctacc aacccatccc cttcagtcag tcgggcaacc |
| 2221 | ctgttatgag cactgttgcc ttcctggcct ctgtcgtcga tccccgagtc gcctctgctg |
| 2281 | ctgcaaagtc agccctagag gagttctcca aaatgaagga agaggtaccc acggccttgg |
| 2341 | tggaggccca tgttcgaaaa gtggaagaag cagccaaagt aacaggcaag gcggaccctg |
| 2401 | ccttcggtct ggaaagcagt ggcattgcag gaaccacctc tgatgagcct gagcggattg |
| 2461 | aggagagcgg gaatgacgag gctcgggtgg aaggccaggc cacagatgag aagaaggagc |
| 2521 | ccaaggaacc ccgagaagga gggggtgcta tagaggagga agcaaaagag aaaaccagcg |
| 2581 | aggctcccaa gaaggatgag gagaaaggga aagaaggcga cagtgagaag gagtccgaga |
| 2641 | agagtgatgg agacccaata gtcgatcctg agaaggagaa ggagccaaag gaagggcagg |
| 2701 | aggaagtgct gaaggaagtg gtggagtctg agggggaaag gaagacaaag gtggagcggg |
| 2761 | acattggcga gggcaacctc tccaccgctg ctgccgccgc cctggccgcc gccgcagtga |
| 2821 | aagctaagca cttggctgct gttgaggaaa ggaagatcaa atctttggtg gccctgctgg |
| 2881 | tggagaccca gatgaaaaag ttggagatca aacttcggca ctttgaggag ctggagacta |
| 2941 | tcatggaccg ggagcgagaa gcactggagt atcagaggca gcagctcctg gccgacagac |
| 3001 | aagccttcca catggagcag ctgaagtatg cggagatgag ggctcggcag cagcacttcc |
| 3061 | aacagatgca ccaacagcag cagcagccac caccagccct gcccccaggc tcccagccta |
| 3121 | tccccccaac aggggctgct gggccacccg cagtccatgg cttggctgtg gctccagcct |
| 3181 | ctgtagtccc tgctcctgct ggcagtgggg cccctccagg aagtttgggc ccttctgaac |
| 3241 | agattgggca ggcagggtca actgcagggc cacagcagca gcaaccagct ggagcccccc |
| 3301 | agcctggggc agtcccacca ggggttcccc cccctggacc ccatggcccc tcaccgttcc |
| 3361 | ccaaccaaca aactcctccc tcaatgatgc caggggcagt gccaggcagc gggcacccag |
| 3421 | gcgtggcgga cccaggcacc cccctgcctc cagaccccac agccccgagc ccaggcacgg |
| 3481 | tcacccctgt gccacctcca cagtgaggag ccagccagac atctctcccc ctcaccccct |
| 3541 | gtggacatca cggttccagg aacagccctt cccccaccac tgggaccctc cccagcctgg |
| 3601 | agagttcatc actacgtaag gaaagctcct tccgcccctc caaagccctc accatgccta |
| 3661 | acagaggcat gcatttttat atcagattat tcaaggactt ctgtttaaaa gatgtttata |
| 3721 | atgtctggga gagaggatag gatgggaatg ctgccctaaa ggaagggctg gtgaaaggtg |
| 3781 | tttatacaag gttctattaa ccacttctaa gggtacacct ccctccaaac tactgcattt |
| 3841 | tctatggatt aaaaaaaaaa aaaaaaagta gattttaaaa agccacattg gagctccctt |
| 3901 | ctacccacta aaaaataacc aatttttaca ttttttgagg gggagtgagt tttaggaaag |
| 3961 | gggaattaag attccaggga gagctctggg gatagaacag ggcgcagatt ccatctctcc |
| 4021 | ccaagcccct ttttagtgac taagtcaagg ccccaactcc cctcccccac cctacgctga |
| 4081 | gcttattcga gttcattcgt actaataatc cctcctgcgg cttcctcatt gttgctgttt |
| 4141 | taggccaccc cagctcagcc aatgattcct ttccctctga atgtcagttt tgtttttaaa |
| 4201 | agtcacttgc ttagttgatg tcagcgtatg tgtatttggt ggggaaaacc taatttcggg |
| 4261 | gatttctgtg gtaggtaata ggagaagaaa gggcactggg ggctgttctc cttccttccc |
| 4321 | tgggctgtat ccatggactc ctggaaggca cagagaaggg agctataaga ggatgtgaag |
| 4381 | ttttaaaacc tgaaattgtt ttttaaagca cttaagcacc tccatattat gacttggtgg |
| 4441 | gtcacccctt agcttcctcc ctctcccacc aagactatga gaacttcagc tgatagctgg |
| 4501 | gggctcccca gatgaggatg cagggatttg ggagcagtgg aagagggtgc ccaaccttgg |
| 4561 | gttggaccaa cccttggctc gcagctcaac tctgcttccc gcattcctgc tccacgtgtc |
| 4621 | ccagcttctc ccctgtgacg ggaaggcagg tgtgactcca ggctctgcac tggttcttct |
| 4681 | tggttcctcc caccaggccc tttgttcctc atgtccccat gtttctctcc ctctgcgtct |
| 4741 | tagcaccttt cttctgttca aagttttctg taaattttct ctttttttct ttctttcttt |
| 4801 | tttttttttt tataaattaa tttgctttca gttccaaaaa aaaaaaaaaa aaaa |

SEQ ID NO: 67 Human SMARCC2 Amino Acid Sequence Isoform B
(NP_620706.1)

| | |
|---|---|
| 1 | mavrkkdggp nvkyyeaadt vtqfdnvrlw lgknykkyiq aepptnksls slvvqllqfq |
| 61 | eevfgkhvsn apltklpikc fldfkaggsl chilaaaykf ksdqgwrryd fqnpsrmdrn |
| 121 | vemfmtieks lvqnnclsrp niflcpeiep kllgklkdii krhqgtvted knnashvvyp |
| 181 | vpgnleeeew vrpvmkrdkq vllhwgyypd sydtwipase ieasvedapt pekprkvhak |
| 241 | wildtdtfne wmneedyevn ddknpvsrrk kisaktltde vnspdsdrrd kkggnykkrk |
| 301 | rspspsptpe akkknakkgp stpytkskrg hreeeqedlt kdmdepspvp nveevtlpkt |
| 361 | vntkkdsesa pvkggtmtdl deqedesmet tgkdedenst gnkgeqtknp dlhednvteq |
| 421 | thhiiipsya awfdynsvha ierralpeff ngknksktpe iylayrnfmi dtyrlnpqey |
| 481 | ltstacrrnl agdvcaimrv hafleqwgli nyqvdaesrp tpmgppptsh fhvladtpsg |
| 541 | lvplqpktpq grqvdadtka grkgkelddl vpetakgkpe lqtsasqqml nfpdkgkekp |
| 601 | tdmqnfglrt dmytkknvps kskaaasatr ewteqetlll lealemykdd wnkvsehvgs |
| 661 | rtqdecilhf lrlpiedpyl edseaslgpl ayqpipfsqs gnpvmstvaf lasvvdprva |
| 721 | saaaksalee fskmkeevpt alveahvrkv eeaakvtgka dpafglessg iagttsdepe |
| 781 | rieesgndea rvegqatdek kepkepregg gaieeeakek tseapkkdee kgkegdseke |
| 841 | seksdgdpiv dpekekepke gqeevlkevv esegerktkv erdigegnls taaaaalaaa |
| 901 | avkakhlaav eerkikslva llvetqmkkl eiklrhfeel etimdrerea leyqrqqlla |
| 961 | drqafhmeql kyaemrarqq hfqqmhqqqq qpppalppgs qpipptgaag ppavhglava |
| 1021 | pasvvpapag sgappgslgp seqigqagst agpqqqqpag apqpgavppg vpppgphgps |
| 1081 | pfpnqqtpps mmpgavpgsg hpgvadpgtp lppdptapsp gtvtpvpppq |

SEQ ID NO: 68 Human SMARCC2 cDNA Sequence Variant 3 (NM_00113020.2,
CDS: 114-3572)

| | |
|---|---|
| 1 | ggaggcggcg gccgcggcgg cgggaggcgg cgggaggcgg gcggaggagg aggcggagga |
| 61 | ggcgggagct gagctgagtg gggcgggcgg cggcggggcc cgagccggag aagatggcgg |
| 121 | tgcggaagaa ggacggcggc cccaacgtga agtactacga ggccgcggac accgtgaccc |
| 181 | agttcgacaa cgtgcggctg tggctcggca agaactacaa gaagtatata caagctgaac |
| 241 | cacccaccaa caagtccctg tctagcctgg ttgtacagtt gctacaattt caggaagaag |
| 301 | tttttggcaa acatgtcagc aatgcaccgc tcactaaact gccgatcaaa tgtttcctag |
| 361 | atttcaaagc gggaggctcc ttgtgccaca ttcttgcagc tgcctacaaa ttcaagagtg |
| 421 | accagggatg gcggcgttac gatttccaga atccatcacg catggaccgc aatgtggaaa |
| 481 | tgtttatgac cattgagaag tccttggtgc agaataattg cctgtctcga cctaacattt |
| 541 | ttctgtgccc agaaattgag cccaaactac tagggaaatt aaaggacatt atcaagagac |
| 601 | accagggaac agtcactgag gataagaaca atgcctccca tgttgtgtat cctgtcccgg |
| 661 | ggaatctaga agaagaggaa tgggtacgac cagtcatgaa gagggataag caggttcttc |
| 721 | tgcactgggg ctactatcct gacagttacg acacgtggat cccagcgagt gaaattgagg |
| 781 | catctgtgga agatgctcca actcctgaga aacctaggaa ggttcatgca aagtggatcc |
| 841 | tggacaccga caccttcaat gaatggatga atgaggaaga ctatgaagta aatgatgaca |
| 901 | aaaaccctgt ctcccgccga aagaagattt cagccaagac actgacagat gaggtgaaca |
| 961 | gcccagattc agatcgacgg gacaagaagg ggggaaacta taagaagagg aagcgctccc |
| 1021 | cctctccttc accaacccca gaagcaaaga agaaaaatgc taagaaaggt ccctcaacac |
| 1081 | cttacactaa gtcaaagcgt ggccacagag aagaggagca agaagacctg acaaaggaca |
| 1141 | tggacgagcc ctcaccagtc cccaatgtag aagaggtgac acttcccaaa acagtcaaca |
| 1201 | caaagaaaga ctcagagtcg gccccagtca aaggcggcac catgaccgac ctggatgaac |
| 1261 | aggaagatga aagcatggag acgacgggca aggatgagga tgagaacagt acggggaaca |
| 1321 | agggagagca gaccaagaat ccagacctgc atgaggacaa tgtgactgaa cagacccacc |
| 1381 | acatcatcat tcccagctac gctgcctggt ttgactacaa tagtgttcat gccattgagc |
| 1441 | ggagggctct ccccgagttc ttcaacggca agaacaagtc caagactcca gagatctacc |
| 1501 | tggcctatcg aaactttatg attgacactt accgactgaa cccccaagag tatcttacct |
| 1561 | ctaccgcctg ccgccgaaac ctagcgggtg atgtctgtgc catcatgagg gtccatgcct |
| 1621 | tcctagaaca gtggggtctt attaactacc aggtggatgc tgagagtcga ccaaccccaa |
| 1681 | tggggcctcc gcctacctct cacttccatg tcttggctga cacaccatca gggctggtgc |
| 1741 | ctctgcagcc caagacacct cagggccgcc aggttgatgc tgataccaag gctgggcgaa |
| 1801 | agggcaaaga gctggatgac ctggtgccag agacggctaa gggcaagcca gagctgcaga |
| 1861 | cctctgcttc ccaacaaatg ctcaactttc ctgacaaagg caaagagaaa ccaacagaca |
| 1921 | tgcaaaactt tgggctgcgc acagacatgt acacaaaaaa gaatgttccc tccaagagca |
| 1981 | aggctgcagc cagtgccact cgtgagtgga cagaacagga aaccctgctt ctcctggagg |
| 2041 | cactggaaat gtacaaagat gactggaaca aagtgtccga gcatgtggga agccgcacac |
| 2101 | aggacgagtg catcttgcat tttcttcgtc ttcccattga agacccatac ctggaggact |
| 2161 | cagaggcctc cctaggcccc ctggcctacc aacccatccc cttcagtcag tcgggcaacc |
| 2221 | ctgttatgag cactgttgcc ttcctggcct ctgtcgtcga tccccgagtc gcctctgctg |
| 2281 | ctgcaaagtc agccctagag gagttctcca aaatgaagga agaggtaccc acggccttgg |
| 2341 | tggaggccca tgttcgaaaa gtggaagaag cagccaaagt aacaggcaag gcggaccctg |
| 2401 | ccttcggtct ggaaagcagt ggcattgcag gaaccacctc tgatgagcct gagcggattg |
| 2461 | aggagagcgg gaatgacgag gctcgggtgg aaggccaggc cacagatgag aagaaggagc |
| 2521 | ccaaggaacc ccgagaagga gggggtgcta tagaggagga agcaaaagag aaaaccagcg |
| 2581 | aggctcccaa gaaggatgag gagaaaggga aagaaggcga cagtgagaag gagtccgaga |
| 2641 | agagtgatgg agacccaata gtcgatcctg agaaggagaa ggagccaaag gaagggcagg |
| 2701 | aggaagtgct gaaggaagtg gtggagtctg agggggaaag gaagacaaag gtggagcggg |
| 2761 | acattggcga gggcaacctc tccaccgctg ctgccgccgc cctggccgcc gccgcagtga |
| 2821 | aagctaagca cttggctgct gttgaggaaa ggaagatcaa atctttggtg gccctgctgg |
| 2881 | tggagaccca gatgaaaaag ttggagatca aacttcggca ctttgaggag ctggagacta |
| 2941 | tcatggaccg ggagcgagaa gcactggagt atcagaggca gcagctcctg gccgacagac |
| 3001 | aagccttcca catggagcag ctgaagtatg cggagatgag ggctcggcag cagcacttcc |
| 3061 | aacagatgca ccaacagcag cagcagccac caccagccct gcccccaggc tcccagccta |
| 3121 | tccccccaac aggggctgct gggccacccg cagtccatgg cttggctgtg gctccagcct |
| 3181 | ctgtagtccc tgctcctgct ggcagtgggg cccctccagg aagtttgggc ccttctgaac |
| 3241 | agattgggca ggcagggtca actgcagggc cacagcagca gcaaccagct ggagcccccc |
| 3301 | agcctggggc agtcccacca ggggttcccc cccctggacc ccatggcccc tcaccgttcc |
| 3361 | ccaaccaaca aactcctccc tcaatgatgc caggggcagt gccaggcagc gggcacccag |
| 3421 | gcgtggcggc ccaaagccct gccattgtgg cagctgttca gggcaacctc ctgcccagtg |
| 3481 | ccagcccact gccagaccca ggcacccccc tgcctccaga ccccacagcc ccgagcccag |
| 3541 | gcacggtcac ccctgtgcca cctccacagt gaggagccag ccagacatct ctccccctca |
| 3601 | ccccctgtgg acatcacggt tccaggaaca gcccttcccc caccactggg accctcccca |
| 3661 | gcctggagag ttcatcacta cgtaaggaaa gctccttccg cccctccaaa gccctcacca |
| 3721 | tgcctaacag aggcatgcat ttttatatca gattattcaa ggacttctgt ttaaaagatg |
| 3781 | tttataatgt ctgggagaga ggataggatg ggaatgctgc cctaaaggaa gggctggtga |
| 3841 | aaggtgttta tacaaggttc tattaaccac ttctaagggt acacctccct ccaaactact |
| 3901 | gcattttcta tggattaaaa aaaaaaaaaa aaagtagatt ttaaaaagcc acattggagc |
| 3961 | tcccttctac ccactaaaaa ataaccaatt tttacatttt ttgaggggga gtgagtttta |
| 4021 | ggaaagggga attaagattc cagggagagc tctggggata gaacagggcg cagattccat |
| 4081 | ctctccccaa gccccttttt agtgactaag tcaaggcccc aactcccctc ccccacccta |
| 4141 | cgctgagctt attcgagttc attcgtacta ataatccctc ctgcggcttc ctcattgttg |
| 4201 | ctgttttagg ccaccccagc tcagccaatg attcctttcc ctctgaatgt cagttttgtt |
| 4261 | tttaaaagtc acttgcttag ttgatgtcag cgtatgtgta tttggtgggg aaaacctaat |
| 4321 | ttcggggatt tctgtggtag gtaataggag aagaaagggc actgggggct gttctccttc |
| 4381 | cttccctggg ctgtatccat ggactcctgg aaggcacaga gaagggagct ataagaggat |
| 4441 | gtgaagtttt aaaacctgaa attgtttttt aaagcactta agcacctcca tattatgact |
| 4501 | tggtgggtca ccccttagct tcctccctct cccaccaaga ctatgagaac ttcagctgat |
| 4561 | agctgggggc tccccagatg aggatgcagg gatttgggag cagtggaaga gggtgcccaa |
| 4621 | ccttgggttg gaccaaccct tggctcgcag ctcaactctg cttcccgcat tcctgctcca |
| 4681 | cgtgtcccag cttctcccct gtgacgggaa ggcaggtgtg actccaggct ctgcactggt |
| 4741 | tcttcttggt tcctcccacc aggccctttg ttcctcatgt ccccatgttt ctctccctct |
| 4801 | gcgtcttagc acctttcttc tgttcaaagt tttctgtaaa ttttctcttt ttttctttct |
| 4861 | ttcttttttt tttttttata aattaatttg ctttcagttc caaaaaaaaa aaaaaaaaaa |

SEQ ID NO: 69 Human SMARCC2 Amino Acid Sequence Isoform C
(NP_001123892.1)

| | |
|---|---|
| 1 | mavrkkdggp nvkyyeaadt vtqfdnvrlw lgknykkyiq aepptnksls slvvqllqfq |
| 61 | eevfgkhvsn apltklpikc fldfkaggsl chilaaaykf ksdqgwrryd fqnpsrmdrn |
| 121 | vemfmtieks lvqnnclsrp niflcpeiep kllgklkdii krhqgtvted knnashvvyp |
| 181 | vpgnleeeew vrpvmkrdkq vllhwgyypd sydtwipase ieasvedapt pekprkvhak |
| 241 | wildtdtfne wmneedyevn ddknpvsrrk kisaktltde vnspdsdrrd kkggnykkrk |
| 301 | rspspsptpe akkknakkgp stpytkskrg hreeegedlt kdmdepspvp nveevtlpkt |
| 361 | vntkkdsesa pvkggtmtdl deqedesmet tgkdedenst gnkgeqtknp dlhednvteq |
| 421 | thhiiipsya awfdynsvha ierralpeff ngknksktpe iylayrnfmi dtyrlnpqey |
| 481 | ltstacrrnl agdvcaimrv hafleqwgli nyqvdaesrp tpmgppptsh fhvladtpsg |
| 541 | lvplqpktpq grqvdadtka grkgkelddl vpetakgkpe lqtsasqqml nfpdkgkekp |
| 601 | tdmqnfglrt dmytkknvps kskaaasatr ewteqetlll lealemykdd wnkvsehvgs |
| 661 | rtqdecilhf lrlpiedpyl edseaslgpl ayqpipfsqs gnpvmstvaf lasvvdprva |
| 721 | saaaksalee fskmkeevpt alveahvrkv eeaakvtgka dpafglessg iagttsdepe |
| 781 | rieesgndea rvegqatdek kepkepregg gaieeeakek tseapkkdee kgkegdseke |
| 841 | seksdgdpiv dpekekepke gqeevlkevv esegerktkv erdigegnls taaaaalaaa |
| 901 | avkakhlaav eerkikslva llvetqmkkl eiklrhfeel etimdrerea leyqrqqlla |
| 961 | drqafhmeql kyaemrarqq hfqqmhqqqq qpppalppgs qpipptgaag ppavhglava |
| 1021 | pasvvpapag sgappgslgp seqigqagst agpqqqqpag apqpgavppg vpppgphgps |
| 1081 | pfpnqqtpps mmpgavpgsg hpgvaaqspa ivaavqgnll psasplpdpg tplppdptap |
| 1141 | spgtvtpvpp pq |

SEQ ID NO: 70 Human SMARCC2 cDNA Sequence Variant 4 (NM_001330288.1,
CDS: 114-3851)

| | |
|---|---|
| 1 | ggaggcggcg gccgcggcgg cgggaggcgg cgggaggcgg gcggaggagg aggcggagga |
| 61 | ggcgggagct gagctgagtg gggcgggcgg cggcggggcc cgagccggag aagatggcgg |
| 121 | tgcggaagaa ggacggcggc cccaacgtga agtactacga ggccgcggac accgtgaccc |
| 181 | agttcgacaa cgtgcggctg tggctcggca agaactacaa gaagtatata caagctgaac |
| 241 | cacccaccaa caagtccctg tctagcctgg ttgtacagtt gctacaattt caggaagaag |
| 301 | tttttggcaa acatgtcagc aatgcaccgc tcactaaact gccgatcaaa tgtttcctag |
| 361 | atttcaaagc gggaggctcc ttgtgccaca ttcttgcagc tgcctacaaa ttcaagagtg |
| 421 | accagggatg gcggcgttac gatttccaga atccatcacg catggaccgc aatgtggaaa |
| 481 | tgtttatgac cattgagaag tccttggtgc agaataattg cctgtctcga cctaacattt |
| 541 | ttctgtgccc agaaattgag cccaaactac tagggaaatt aaaggacatt atcaagagac |
| 601 | accagggaac agtcactgag gataagaaca atgcctccca tgttgtgtat cctgtcccgg |
| 661 | ggaatctaga agaagaggaa tgggtacgac cagtcatgaa gagggataag caggttcttc |
| 721 | tgcactgggg ctactatcct gacagttacg acacgtggat cccagcgagt gaaattgagg |
| 781 | catctgtgga agatgctcca actcctgaga aacctaggaa ggttcatgca aagtggatcc |
| 841 | tggacaccga caccttcaat gaatggatga atgaggaaga ctatgaagta aatgatgaca |
| 901 | aaaaccctgt ctcccgccga aagaagattt cagccaagac actgacagat gaggtgaaca |
| 961 | gcccagattc agatcgacgg gacaagaagg ggggaaacta taagaagagg aagcgctccc |
| 1021 | cctctccttc accaacccca gaagcaaaga agaaaaatgc taagaaaggt ccctcaacac |
| 1081 | cttacactaa gtcaaagcgt ggccacagag aagaggagca agaagacctg acaaaggaca |
| 1141 | tggacgagcc ctcaccagtc cccaatgtag aagaggtgac acttcccaaa acagtcaaca |
| 1201 | caaagaaaga ctcagagtcg gccccagtca aaggcggcac catgaccgac ctggatgaac |
| 1261 | aggaagatga aagcatggag acgacgggca aggatgagga tgagaacagt acggggaaca |
| 1321 | agggagagca gaccaagaat ccagacctgc atgaggacaa tgtgactgaa cagacccacc |
| 1381 | acatcatcat tcccagctac gctgcctggt ttgactacaa tagtgttcat gccattgagc |
| 1441 | ggagggctct ccccgagttc ttcaacggca agaacaagtc caagactcca gagatctacc |
| 1501 | tggcctatcg aaactttatg attgacactt accgactgaa cccccaagag tatcttacct |
| 1561 | ctaccgcctg ccgccgaaac ctagcgggtg atgtctgtgc catcatgagg gtccatgcct |
| 1621 | tcctagaaca gtggggtctt attaactacc aggtggatgc tgagagtcga ccaaccccaa |
| 1681 | tggggcctcc gcctacctct cacttccatg tcttggctga cacaccatca gggctggtgc |
| 1741 | ctctgcagcc caagacacct cagggccgcc aggttgatgc tgataccaag gctgggcgaa |
| 1801 | agggcaaaga gctggatgac ctggtgccag agacggctaa gggcaagcca gagctgcaga |
| 1861 | cctctgcttc ccaacaaatg ctcaactttc ctgacaaagg caaagagaaa ccaacagaca |
| 1921 | tgcaaaactt tgggctgcgc acagacatgt acacaaaaaa gaatgttccc tccaagagca |
| 1981 | aggctgcagc cagtgccact cgtgagtgga cagaacagga aaccctgctt ctcctggagg |
| 2041 | cactggaaat gtacaaagat gactggaaca aagtgtccga gcatgtggga agccgcacac |
| 2101 | aggacgagtg catcttgcat tttcttcgtc ttcccattga agacccatac ctggaggact |
| 2161 | cagaggcctc cctaggcccc ctggcctacc aacccatccc cttcagtcag tcgggcaacc |
| 2221 | ctgttatgag cactgttgcc ttcctggcct ctgtcgtcga tccccgagtc gcctctgctg |
| 2281 | ctgcaaagtc agccctagag gagttctcca aaatgaagga agaggtaccc acggccttgg |
| 2341 | tggaggccca tgttcgaaaa gtggaagaag cagccaaagt aacaggcaag gcggaccctg |
| 2401 | ccttcggtct ggaaagcagt ggcattgcag gaaccacctc tgatgagcct gagcggattg |
| 2461 | aggagagcgg gaatgacgag gctcgggtgg aaggccaggc cacagatgag aagaaggagc |
| 2521 | ccaaggaacc ccgagaagga gggggtgcta tagaggagga agcaaaagag aaaaccagcg |
| 2581 | aggctcccaa gaaggatgag gagaaaggga aagaaggcga cagtgagaag gagtccgaga |
| 2641 | agagtgatgg agacccaata gtcgatcctg agaaggagaa ggagccaaag gaagggcagg |
| 2701 | aggaagtgct gaaggaagtg gtggagtctg agggggaaag gaagacaaag gtggagcggg |
| 2761 | acattggcga gggcaacctc tccaccgctg ctgccgccgc cctggccgcc gccgcagtga |
| 2821 | aagctaagca cttggctgct gttgaggaaa ggaagatcaa atctttggtg gccctgctgg |
| 2881 | tggagaccca gatgaaaaag ttggagatca aacttcggca ctttgaggag ctggagacta |
| 2941 | tcatggaccg ggagcgagaa gcactggagt atcagaggca gcagctcctg gccgacagac |
| 3001 | aagccttcca catggagcag ctgaagtatg cggagatgag ggctcggcag cagcacttcc |
| 3061 | aacagatgca ccaacagcag cagcagccac caccagccct gcccccaggc tcccagccta |
| 3121 | tccccccaac aggggctgct gggccacccg cagtccatgg cttggctgtg gctccagcct |
| 3181 | ctgtagtccc tgctcctgct ggcagtgggg cccctccagg aagtttgggc ccttctgaac |
| 3241 | agattgggca ggcagggtca actgcagggc cacagcagca gcaaccagct ggagcccccc |
| 3301 | agcctggggc agtcccacca ggggttcccc cccctggacc ccatggcccc tcaccgttcc |
| 3361 | ccaaccaaca aactcctccc tcaatgatgc caggggcagt gccaggcagc gggcacccag |
| 3421 | gcgtggcggg taatgctcct ttgggtttgc cttttggcat gccgcctcct cctcctcctc |
| 3481 | ctgctccatc catcatccca tttggtagtc tagctgactc catcagtatt aacctccccg |
| 3541 | ctcctcctaa cctgcatggg catcaccacc atctcccgtt cgccccgggc actctccccc |
| 3601 | cacctaacct gcctgtgtcc atggcgaacc ctctacatcc taacctgccg gcgaccacca |
| 3661 | ccatgccatc ttccttgcct ctcgggccgg ggctcggatc cgccgcagcc caaagccctg |
| 3721 | ccattgtggc agctgttcag ggcaacctcc tgcccagtgc cagcccactg ccagacccag |
| 3781 | gcacccccct gcctccagac cccacagccc cgagcccagg cacggtcacc cctgtgccac |
| 3841 | ctccacagtg aggagccagc cagacatctc tccccctcac cccctgtgga catcacggtt |
| 3901 | ccaggaacag cccttccccc accactggga ccctccccag cctggagagt tcatcactac |
| 3961 | gtaaggaaag ctccttccgc ccctccaaag ccctcaccat gcctaacaga ggcatgcatt |
| 4021 | tttatatcag attattcaag gacttctgtt taaaagatgt ttataatgtc tgggagagag |
| 4081 | gataggatgg gaatgctgcc ctaaaggaag ggctggtgaa aggtgtttat acaaggttct |
| 4141 | attaaccact tctaagggta cacctccctc caaactactg cattttctat ggattaaaaa |
| 4201 | aaaaaaaaaa aagtagattt taaaaagcca cattggagct cccttctacc cactaaaaaa |
| 4261 | taaccaattt ttacattttt tgagggggag tgagttttag gaaaggggaa ttaagattcc |
| 4321 | agggagagct ctggggatag aacagggcgc agattccatc tctccccaag ccccttttta |
| 4381 | gtgactaagt caaggcccca actcccctcc cccaccctac gctgagctta ttcgagttca |
| 4441 | ttcgtactaa taatccctcc tgcggcttcc tcattgttgc tgttttaggc caccccagct |
| 4501 | cagccaatga ttcctttccc tctgaatgtc agttttgttt ttaaaagtca cttgcttagt |
| 4561 | tgatgtcagc gtatgtgtat ttggtgggga aaacctaatt tcggggattt ctgtggtagg |
| 4621 | taataggaga agaaagggca ctgggggctg ttctccttcc ttccctgggc tgtatccatg |
| 4681 | gactcctgga aggcacagag aagggagcta taagaggatg tgaagtttta aaacctgaaa |
| 4741 | ttgtttttta aagcacttaa gcacctccat attatgactt ggtgggtcac cccttagctt |
| 4801 | cctccctctc ccaccaagac tatgagaact tcagctgata gctgggggct ccccagatga |
| 4861 | ggatgcaggg atttgggagc agtggaagag ggtgcccaac cttgggttgg accaaccctt |
| 4921 | ggctcgcagc tcaactctgc ttcccgcatt cctgctccac gtgtcccagc ttctcccctg |
| 4981 | tgacgggaag gcaggtgtga ctccaggctc tgcactggtt cttcttggtt cctcccacca |
| 5041 | ggccctttgt tcctcatgtc cccatgtttc tctccctctg cgtcttagca cctttcttct |
| 5101 | gttcaaagtt ttctgtaaat tttctctttt tttctttctt tctttttttt ttttttataa |
| 5161 | attaatttgc tttcagttcc aaaaaaaaaa aaaaaaaaa |

SEQ ID NO: 71 Human SMARCC2 Amino Acid Sequence Isoform D
(NP_001317217.1)

| | |
|---|---|
| 1 | mavrkkdggp nvkyyeaadt vtqfdnvrlw lgknykkyiq aepptnksls slvvqllqfq |
| 61 | eevfgkhvsn apltklpikc fldfkaggsl chilaaaykf ksdqgwrryd fqnpsrmdrn |
| 121 | vemfmtieks lvqnnclsrp niflcpeiep kllgklkdii krhqgtvted knnashvvyp |
| 181 | vpgnleeeew vrpvmkrdkq vllhwgyypd sydtwipase ieasvedapt pekprkvhak |
| 241 | wildtdtfne wmneedyevn ddknpvsrrk kisaktltde vnspdsdrrd kkggnykkrk |
| 301 | rspspsptpe akkknakkgp stpytkskrg hreeeqedlt kdmdepspvp nveevtlpkt |
| 361 | vntkkdsesa pvkggtmtdl deqedesmet tgkdedenst gnkgeqtknp dlhednvteq |
| 421 | thhiiipsya awfdynsvha ierralpeff ngknksktpe iylayrnfmi dtyrlnpqey |
| 481 | ltstacrrnl agdvcaimrv hafleqwgli nyqvdaesrp tpmgppptsh fhvladtpsg |
| 541 | lvplqpktpq grqvdadtka grkgkelddl vpetakgkpe lqtsasqqml nfpdkgkekp |
| 601 | tdmqnfglrt dmytkknvps kskaaasatr ewteqetlll lealemykdd wnkvsehvgs |
| 661 | rtqdecilhf lrlpiedpyl edseaslgpl ayqpipfsqs gnpvmstvaf lasvvdprva |
| 721 | saaaksalee fskmkeevpt alveahvrkv eeaakvtgka dpafglessg iagttsdepe |
| 781 | rieesgndea rvegqatdek kepkepregg gaieeeakek tseapkkdee kgkegdseke |
| 841 | seksdgdpiv dpekekepke gqeevlkevv esegerktkv erdigegnls taaaaalaaa |
| 901 | avkakhlaav eerkikslva llvetqmkkl eiklrhfeel etimdrerea leyqrqqlla |
| 961 | drqafhmeql kyaemrarqq hfqqmhqqqq qpppalppgs qpipptgaag ppavhglava |
| 1021 | pasvvpapag sgappgslgp seqigqagst agpqqqqpag apqpgavppg vpppgphgps |
| 1081 | pfpnqqtpps mmpgavpgsg hpgvagnapl glpfgmpppp pppapsiipf gsladsisin |
| 1141 | lpappnlhgh hhhlpfapgt lpppnlpvsm anplhpnlpa tttmpsslpl gpglgsaaaq |
| 1201 | spaivaavqg nllpsasplp dpgtplppdp tapspgtvtp vpppq |

SEQ ID NO: 72 Mouse SMARCC2 cDNA Sequence Variant 1 (NM_001114097.1,
CDS: 92-3733)

| | |
|---|---|
| 1 | gtggcggcgg gaggcggcgg gaggcgggcg gaggaggagg cgggagctga gctgagcggg |
| 61 | gcgggcggcg gcggggcccg agcccgagaa gatggcggtg cggaagaagg acggcggccc |
| 121 | caacgtgaag tactacgagg ccgcggacac cgtgacccag ttcgacaacg tgcggctctg |
| 181 | gctcggcaag aactacaaga agtacataca agcagaaccg ccaaccaaca agtctctgtc |
| 241 | cagcctggtg gtgcagttgc tccagtttca ggaagaggtt tttggcaaac atgtcagcaa |
| 301 | cgcaccgctt actaaactgc cgatcaaatg tttcctagat ttcaaagcag gaggatccct |
| 361 | ctgccatatt cttgcagctg cctacaaatt caagagtgac cagggatggc ggcgttacga |
| 421 | tttccagaat ccatcacgca tggaccgcaa tgtggaaatg ttcatgacca ttgagaagtc |
| 481 | cttggtacag aataattgcc tgtcacgacc taacattttc ctctgcccag aaattgagcc |
| 541 | caaactgcta gggaaattaa aagacattgt taagagacac cagggaacca tctctgagga |
| 601 | taagagcaat gcctcccatg ttgtgtatcc tgtcccaggg aacctagaag aagaggaatg |
| 661 | ggtacggcca gtcatgaaga gggataaaca ggttcttctg cactggggct actatcctga |
| 721 | cagctacgac acgtggatcc cagcgagtga aattgaagca tctgtggagg acgctcccac |
| 781 | tcctgagaaa ccgaggaagg tccatgcgaa gtggatcctc gacaccgaca cattcaacga |
| 841 | gtggatgaat gaggaagact acgaagtcag tgacgacaaa agcccagtct cccgcaggaa |
| 901 | gaagatctca gccaagacgc tgacagacga ggtaaacagc ccagattcag acagacgaga |
| 961 | caagaagggg ggcaactata agaagaggaa gcgctctccc tctccttcac ccaccccaga |
| 1021 | ggctaagaag aaaaacgcta agaaaggacc ctcaacacct tataccaagt caaagcgagg |
| 1081 | ccacagagaa gaggaacaag aagacctgac aaaagacatg gatgagccct ctccagtccc |
| 1141 | aaacgtggaa gaggtgacac tccccaaaac agtcaacact aaaaaggact ctgagtcagc |
| 1201 | cccagtcaaa ggcggcacca tgactgacct ggatgaacag gacgatgaaa gcatggagac |
| 1261 | caccggcaag gacgaggatg agaacagcac gggcaacaaa ggcgagcaga cgaagaaccc |
| 1321 | ggacctgcat gaggacaatg tgaccgagca gacccaccac atcatcatcc ccagctacgc |
| 1381 | cgcctggttt gactacaaca gcgtccatgc cattgaacgg agggctcttc ctgagttctt |
| 1441 | caacggcaag aacaagtcta agactccaga gatctacctg gcgtatcgga acttcatgat |
| 1501 | tgacacttac cgactgaatc cccaggagta tctaacatct actgcctgtc ggcggaattt |
| 1561 | ggcgggtgat gtctgcgcta tcatgagggt ccatgccttc ctggaacagt ggggtcttat |
| 1621 | taactaccag gtagatgctg agagccgacc aaccccaatg gggcctccac ccacctctca |
| 1681 | cttccatgtc ttggcggaca caccatcagg gctggttcct cttcagccga agcctccaca |
| 1741 | gcagagctct gcttcccagc aaatgctgaa cttccctgag aagggcaagg agaaaccagc |
| 1801 | agacatgcag aattttgggc tgcgcacaga catgtacaca aagaagaacg tcccctccaa |
| 1861 | gagcaaagct gcagcaagtg ccactcggga atggacggag caggagactc tgctgctcct |
| 1921 | ggaggctttg gaaatgtaca aggacgactg gaacaaagta tctgagcacg tgggaagccg |
| 1981 | cacgcaggac gagtgcatct tgcattttct ccgccttccc attgaagacc catacctgga |
| 2041 | ggactcggag gcttctctag gccctctggc ctaccaaccc atccccttca gtcagtcagg |
| 2101 | caaccctgtt atgagcaccg ttgccttcct ggcctctgtc gtcgatcccc gagttgcctc |
| 2161 | tgctgctgcg aagtcagccc tagaagagtt ctcaaaaatg aaggaagagg tgcccacagc |
| 2221 | tttggtggaa gcccacgtgc gtaaggtcga agaagcggcc aaagtcacag gcaaggccga |
| 2281 | cccagccttt ggtctggaga gtagcggcat cgcagggact gcctctgatg agcctgagcg |
| 2341 | cattgaggaa agcgggactg aggaggcacg gccagagggc caggcagcag atgagaagaa |
| 2401 | ggagcctaag gaaccacggg aaggaggggg cgctgtggag gaagaagcaa aggaggaaat |
| 2461 | aagtgaggtc cccaagaaag atgaagagaa agggaaagaa ggtgacagtg agaaggagtc |
| 2521 | tgagaagagt gacggggacc cgatagttga tcctgagaaa gacaaggaac caacagaagg |
| 2581 | gcaggaggaa gtgctaaagg aagtggcaga gccagagggg gagaggaaaa ccaaggtgga |
| 2641 | gcgtgacatt ggtgaaggca acctgtccac agctgcagcc gcagccctgg ccgctgctgc |
| 2701 | agtcaaggcc aagcacttgg ctgcagttga ggagagaaag atcaagtctt tggtggctct |
| 2761 | gctggtagag acccaaatga agaaactaga gatcaaactc cgacattttg aggagctgga |
| 2821 | gacaataatg gaccgggagc gagaggcgct ggaataccag aggcagcagc tcctggccga |
| 2881 | ccggcaagcc ttccacatgg agcagctgaa gtatgcagag atgagggccc ggcagcagca |
| 2941 | cttccagcag atgcaccagc agcagcagca gcagccacca accttgcccc caggctccca |
| 3001 | gcccatacct cccaccgggg ctgctggacc acctacagtc catggtctag ctgtgcctcc |
| 3061 | agccgctgtg gcctctgccc ctcctggcag tggggcccct cctggaagct tgggcccttc |
| 3121 | tgaacagatt gggcaggcag ggacaactgc agggccacag cagccacaac aagctggagc |
| 3181 | ccctcagcct ggggcagtcc caccaggggt acccccccct ggaccccatg gcccctcacc |
| 3241 | gttccccaac caaccaactc ctccctcaat gatgccaggg gcagtgccag gcagcgggca |
| 3301 | cccaggcgtg gcgggtaatg ctcctttggg tttgcctttt ggcatgccgc ctcctcctcc |
| 3361 | tgctgctcca tccgtcatcc cattcggtag tctagctgac tccattagta ttaaccttcc |
| 3421 | ccctcctcct aacctgcatg ggcatcacca ccatctcccg tttgccccgg gcactatccc |
| 3481 | cccacctaac ctgcctgtgt ccatggcgaa ccctctacat cctaacctgc cggcgaccac |
| 3541 | caccatgcca tcttccttgc ctctcgggcc ggggctcgga tccgccgcag cccagagccc |
| 3601 | tgccattgtg gcagctgttc agggcaacct cctgcccagt gccagcccac tgccagaccc |
| 3661 | aggcaccccg ctgcctccag accccacagc tccaagccca ggcacagtca cccctgtgcc |
| 3721 | acctccacag tgaggaacca gccagccatc tctccccctc actccccatg gagatcacag |
| 3781 | ttccaggaac agccctcccc cactactggg accctccctc agcctgaaga gttcatcact |
| 3841 | acgtaaggaa agctcctcct gccccctcac cacccccacc atgcccagca gaggtgtgca |
| 3901 | gttttatatc caattattat ccacggactt ctgactaaaa gatgtttcta atgcctggga |
| 3961 | gagagaatag gagggaaaga tgtttatacg aggttctact aactggttct gagggtctac |
| 4021 | cccttcagaa ttactgcatt tttgaagtga taacatgaaa atgaaaccct ttaaaaggga |
| 4081 | ggttttaaaa aaagacactt cggagcccac aaaaaaagaa cttttttaat tattattatt |
| 4141 | attattttga ggggaaaggg caggttttaa gaggaattaa atttctgggg caaggtgtga |
| 4201 | ggtggaatag ggcaccgagc ctgtctccct gagcccttgg cagtgctgag tcagctcccc |
| 4261 | tcacccattc cagtttattc atacaaatcc ctcctgctgc tcgtcatggt tgctgtttta |
| 4321 | ggcccagttc agccaatgac cttttcctcc agtcagcttt gtgtttgtgt ttaagtcacc |
| 4381 | tgcttactcg tcagcgtctg tgtacttgtg ggaaatgtag ttttcgggga ttctgtggta |
| 4441 | ggaaatagag gaagaagggg cctcagttgg gctcttcttc ctgctttcct agttgtatct |
| 4501 | gtgagtgccc aacaggcatc agagggggag ctctaagagg atggggggcc tgcagaccct |
| 4561 | caagtttgaa aagcacttaa gcacctactt ttgacagtgg gacagtctgc taacttctgc |
| 4621 | ccccaccaac caagcctgac agaacccagt gatagctagg agttccccaa atgaggacaa |
| 4681 | agatttggga gcagtgcagc gtgcctctgc actccaggtc ttcctcttca ccccctactt |
| 4741 | ggaggcagac acaattccag gccgcaccag agcctggccc ctcccaccag gcgctttgct |
| 4801 | ccttctgtcc cagcgtctcc ttcctctgca tctccacacc tttcttctgt tcaaagtctt |
| 4861 | ctgtaaaatt ttctttcctt ctttgttctt ttctttttcc tttttttttt ataaattaat |
| 4921 | ttgctttcag ttccaaaaaa aaaaaaaaaa aaaaaaaaaa aaaa |

SEQ ID NO: 73 Mouse SMARCC2 Amino Acid Sequence Isoform 1
(NP_001107569.1)

| | |
|---|---|
| 1 | mavrkkdggp nvkyyeaadt vtqfdnvrlw lgknykkyiq aepptnksls slvvqllqfq |
| 61 | eevfgkhvsn apltklpikc fldfkaggsl chilaaaykf ksdqgwrryd fqnpsrmdrn |
| 121 | vemfmtieks lvqnnclsrp niflcpeiep kllgklkdiv krhqgtised ksnashvvyp |
| 181 | vpgnleeeew vrpvmkrdkq vllhwgyypd sydtwipase ieasvedapt pekprkvhak |
| 241 | wildtdtfne wmneedyevs ddkspvsrrk kisaktltde vnspdsdrrd kkggnykkrk |
| 301 | rspspsptpe akkknakkgp stpytkskrg hreeeqedlt kdmdepspvp nveevtlpkt |
| 361 | vntkkdsesa pvkggtmtdl deqddesmet tgkdedenst gnkgeqtknp dlhednvteq |
| 421 | thhiiipsya awfdynsvha ierralpeff ngknksktpe iylayrnfmi dtyrlnpqey |
| 481 | ltstacrrnl agdvcaimrv hafleqwgli nyqvdaesrp tpmgppptsh fhvladtpsg |
| 541 | lvplqpkppq qssasqqmln fpekgkekpa dmqnfglrtd mytkknvpsk skaaasatre |
| 601 | wteqetllll ealemykddw nkvsehvgsr tqdecilhfl rlpiedpyle dseaslgpla |
| 661 | yqpipfsqsg npvmstvafl asvvdprvas aaaksaleef skmkeevpta lveahvrkve |
| 721 | eaakvtgkad pafglessgi agtasdeper ieesgteear pegqaadekk epkepreggg |
| 781 | aveeeakeei sevpkkdeek gkegdsekes eksdgdpivd pekdkepteg qeevlkevae |
| 841 | pegerktkve rdigegnlst aaaaalaaaa vkakhlaave erkikslval lvetqmkkle |
| 901 | iklrhfeele timdrereal eyqrqqllad rqafhmeqlk yaemrarqqh fqqmhqqqqq |
| 961 | qpptlppgsq pipptgaagp ptvhglavpp aavasappgs gappgslgps eqigqagtta |
| 1021 | gpqqpqqaga pqpgavppgv pppgphgpsp fpnqptppsm mpgavpgsgh pgvagnaplg |
| 1081 | 1pfgmppppp aapsvipfgs ladsisinlp pppnlhghhh hlpfapgtip ppnlpvsman |
| 1141 | plhpnlpatt tmpsslplgp glgsaaaqsp aivaavqgnl lpsasplpdp gtplppdpta |
| 1201 | pspgtvtpvp ppq |

SEQ ID NO: 74 Mouse SMARCC2 cDNA Sequence Variant 2 (NM_001114096.1,
CDS: 92-3484)

| | |
|---|---|
| 1 | gtggcggcgg gaggcggcgg gaggcgggcg gaggaggagg cgggagctga gctgagcggg |
| 61 | gcgggcggcg gcggggcccg agcccgagaa gatggcggtg cggaagaagg acggcggccc |
| 121 | caacgtgaag tactacgagg ccgcggacac cgtgacccag ttcgacaacg tgcggctctg |
| 181 | gctcggcaag aactacaaga agtacataca agcagaaccg ccaaccaaca agtctctgtc |
| 241 | cagcctggtg gtgcagttgc tccagtttca ggaagaggtt tttggcaaac atgtcagcaa |
| 301 | cgcaccgctt actaaactgc cgatcaaatg tttcctagat ttcaaagcag gaggatccct |
| 361 | ctgccatatt cttgcagctg cctacaaatt caagagtgac cagggatggc ggcgttacga |
| 421 | tttccagaat ccatcacgca tggaccgcaa tgtggaaatg ttcatgacca ttgagaagtc |
| 481 | cttggtacag aataattgcc tgtcacgacc taacattttc ctctgcccag aaattgagcc |
| 541 | caaactgcta gggaaattaa aagacattgt taagagacac cagggaacca tctctgagga |
| 601 | taagagcaat gcctcccatg ttgtgtatcc tgtcccaggg aacctagaag aagaggaatg |
| 661 | ggtacggcca gtcatgaaga gggataaaca ggttcttctg cactggggct actatcctga |
| 721 | cagctacgac acgtggatcc cagcgagtga aattgaagca tctgtggagg acgctcccac |
| 781 | tcctgagaaa ccgaggaagg tccatgcgaa gtggatcctc gacaccgaca cattcaacga |
| 841 | gtggatgaat gaggaagact acgaagtcag tgacgacaaa agcccagtct cccgcaggaa |
| 901 | gaagatctca gccaagacgc tgacagacga ggtaaacagc ccagattcag acagacgaga |
| 961 | caagaagggg ggcaactata agaagaggaa gcgctctccc tctccttcac ccaccccaga |
| 1021 | ggctaagaag aaaaacgcta agaaaggacc ctcaacacct tataccaagt caaagcgagg |
| 1081 | ccacagagaa gaggaacaag aagacctgac aaaagacatg gatgagccct ctccagtccc |
| 1141 | aaacgtggaa gaggtgacac tccccaaaac agtcaacact aaaaaggact ctgagtcagc |
| 1201 | cccagtcaaa ggcggcacca tgactgacct ggatgaacag gacgatgaaa gcatggagac |
| 1261 | caccggcaag gacgaggatg agaacagcac gggcaacaaa ggcgagcaga cgaagaaccc |
| 1321 | ggacctgcat gaggacaatg tgaccgagca gacccaccac atcatcatcc ccagctacgc |
| 1381 | cgcctggttt gactacaaca gcgtccatgc cattgaacgg agggctcttc ctgagttctt |
| 1441 | caacggcaag aacaagtcta agactccaga gatctacctg gcgtatcgga acttcatgat |
| 1501 | tgacacttac cgactgaatc cccaggagta tctaacatct actgcctgtc ggcggaattt |
| 1561 | ggcgggtgat gtctgcgcta tcatgagggt ccatgccttc ctggaacagt ggggtcttat |
| 1621 | taactaccag gtagatgctg agagccgacc aaccccaatg gggcctccac ccacctctca |
| 1681 | cttccatgtc ttggcggaca caccatcagg gctggttcct cttcagccga agcctccaca |
| 1741 | gggccgccag gttgatgctg acaccaaggc tgggcggaag ggcaaagagc tggatgacct |
| 1801 | ggtgccagag acggctaagg gcaagccaga gctgcagagc tctgcttccc agcaaatgct |
| 1861 | gaacttccct gagaagggca aggagaaacc agcagacatg cagaattttg ggctgcgcac |
| 1921 | agacatgtac acaaagaaga acgtcccctc caagagcaaa gctgcagcaa gtgccactcg |
| 1981 | ggaatggacg gagcaggaga ctctgctgct cctggaggct ttggaaatgt acaaggacga |
| 2041 | ctggaacaaa gtatctgagc acgtgggaag ccgcacgcag gacgagtgca tcttgcattt |
| 2101 | tctccgcctt cccattgaag acccatacct ggaggactcg gaggcttctc taggccctct |
| 2161 | ggcctaccaa cccatcccct tcagtcagtc aggcaaccct gttatgagca ccgttgcctt |
| 2221 | cctggcctct gtcgtcgatc cccgagttgc ctctgctgct gcgaagtcag ccctagaaga |
| 2281 | gttctcaaaa atgaaggaag aggtgcccac agctttggtg gaagcccacg tgcgtaaggt |
| 2341 | cgaagaagcg gccaaagtca caggcaaggc cgacccagcc tttggtctgg agagtagcgg |
| 2401 | catcgcaggg actgcctctg atgagcctga gcgcattgag gaaagcggga ctgaggaggc |
| 2461 | acggccagag ggccaggcag cagatgagaa gaaggagcct aaggaaccac gggaaggagg |
| 2521 | gggcgctgtg gaggaagaag caaaggagga aataagtgag gtccccaaga aagatgaaga |
| 2581 | gaaagggaaa gaaggtgaca gtgagaagga gtctgagaag agtgacgggg acccgatagt |
| 2641 | tgatcctgag aaagacaagg aaccaacaga agggcaggag gaagtgctaa aggaagtggc |
| 2701 | agagccagag ggggagagga aaaccaaggt ggagcgtgac attggtgaag gcaacctgtc |
| 2761 | cacagctgca gccgcagccc tggccgctgc tgcagtcaag gccaagcact tggctgcagt |
| 2821 | tgaggagaga aagatcaagt ctttggtggc tctgctggta gagacccaaa tgaagaaact |
| 2881 | agagatcaaa ctccgacatt ttgaggagct ggagacaata atggaccggg agcgagaggc |
| 2941 | gctggaatac cagaggcagc agctcctggc cgaccggcaa gccttccaca tggagcagct |
| 3001 | gaagtatgca gagatgaggg cccggcagca gcacttccag cagatgcacc agcagcagca |
| 3061 | gcagcagcca ccaaccttgc ccccaggctc ccagcccata cctcccaccg gggctgctgg |
| 3121 | accacctaca gtccatggtc tagctgtgcc tccagccgct gtggcctctg cccctcctgg |
| 3181 | cagtggggcc cctcctggaa gcttgggccc ttctgaacag attgggcagg cagggacaac |
| 3241 | tgcagggcca cagcagccac aacaagctgg agcccctcag cctggggcag tcccaccagg |
| 3301 | ggtacccccc cctggacccc atggcccctc accgttcccc aaccaaccaa ctcctccctc |
| 3361 | aatgatgcca ggggcagtgc caggcagcgg gcacccaggc gtggcggacc caggcacccc |
| 3421 | gctgcctcca gaccccacag ctccaagccc aggcacagtc acccctgtgc cacctccaca |
| 3481 | gtgaggaacc agccagccat ctctccccct cactccccat ggagatcaca gttccaggaa |
| 3541 | cagccctccc ccactactgg gaccctccct cagcctgaag agttcatcac tacgtaagga |
| 3601 | aagctcctcc tgccccctca ccacccccac catgcccagc agaggtgtgc agttttatat |
| 3661 | ccaattatta tccacggact tctgactaaa agatgtttct aatgcctggg agagagaata |
| 3721 | ggagggaaag atgtttatac gaggttctac taactggttc tgagggtcta ccccttcaga |
| 3781 | attactgcat ttttgaagtg ataacatgaa aatgaaaccc tttaaaaggg aggttttaaa |
| 3841 | aaaagacact tcggagccca caaaaaaaga acttttttaa ttattattat tattattttg |
| 3901 | aggggaaagg gcaggtttta agaggaatta aatttctggg gcaaggtgtg aggtggaata |
| 3961 | gggcaccgag cctgtctccc tgagcccttg gcagtgctga gtcagctccc ctcacccatt |
| 4021 | ccagtttatt catacaaatc cctcctgctg ctcgtcatgg ttgctgtttt aggcccagtt |
| 4081 | cagccaatga ccttttcctc cagtcagctt tgtgtttgtg tttaagtcac ctgcttactc |
| 4141 | gtcagcgtct gtgtacttgt gggaaatgta gttttcgggg attctgtggt aggaaataga |
| 4201 | ggaagaaggg gcctcagttg ggctcttctt cctgctttcc tagttgtatc tgtgagtgcc |
| 4261 | caacaggcat cagaggggga gctctaagag gatggggggc ctgcagaccc tcaagtttga |
| 4321 | aaagcactta agcacctact tttgacagtg ggacagtctg ctaacttctg cccccaccaa |
| 4381 | ccaagcctga cagaacccag tgatagctag gagttcccca aatgaggaca aagatttggg |
| 4441 | agcagtgcag cgtgcctctg cactccaggt cttcctcttc accccctact tggaggcaga |
| 4501 | cacaattcca ggccgcacca gagcctggcc cctcccacca ggcgctttgc tccttctgtc |
| 4561 | ccagcgtctc cttcctctgc atctccacac ctttcttctg ttcaaagtct tctgtaaaat |
| 4621 | tttctttcct tctttgttct tttctttttc cttttttttt tataaattaa tttgctttca |
| 4681 | gttccaaaaa aaaaaaaaaa aaaaaaaaaa aaaaa |

SEQ ID NO: 75 Mouse SMARCC2 Amino Acid Sequence Isoform 2
(NP_001107568.1)

| | |
|---|---|
| 1 | mavrkkdggp nvkyyeaadt vtqfdnvrlw lgknykkyiq aepptnksls slvvqllqfq |
| 61 | eevfgkhvsn apltklpikc fldfkaggsl chilaaaykf ksdqgwrryd fqnpsrmdrn |
| 121 | vemfmtieks lvqnnclsrp niflcpeiep kllgklkdiv krhqgtised ksnashvvyp |
| 181 | vpgnleeeew vrpvmkrdkq vllhwgyypd sydtwipase ieasvedapt pekprkvhak |
| 241 | wildtdtfne wmneedyevs ddkspvsrrk kisaktltde vnspdsdrrd kkggnykkrk |
| 301 | rspspsptpe akkknakkgp stpytkskrg hreeeqedlt kdmdepspvp nveevtlpkt |
| 361 | vntkkdsesa pvkggtmtdl deqddesmet tgkdedenst gnkgeqtknp dlhednvteq |
| 421 | thhiiipsya awfdynsvha ierralpeff ngknksktpe iylayrnfmi dtyrlnpqey |
| 481 | ltstacrrnl agdvcaimrv hafleqwgli nyqvdaesrp tpmgppptsh fhvladtpsg |
| 541 | lvplqpkppq grqvdadtka grkgkelddl vpetakgkpe lqssasqqml nfpekgkekp |
| 601 | admqnfglrt dmytkknvps kskaaasatr ewteqetlll lealemykdd wnkvsehvgs |
| 661 | rtqdecilhf lrlpiedpyl edseaslgpl ayqpipfsqs gnpvmstvaf lasvvdprva |
| 721 | saaaksalee fskmkeevpt alveahvrkv eeaakvtgka dpafglessg iagtasdepe |
| 781 | rieesgteea rpegqaadek kepkepregg gaveeeakee isevpkkdee kgkegdseke |
| 841 | seksdgdpiv dpekdkepte gqeevlkeva epegerktkv erdigegnls taaaaalaaa |
| 901 | avkakhlaav eerkikslva llvetqmkkl eiklrhfeel etimdrerea leyqrqqlla |
| 961 | drqafhmeql kyaemrarqq hfqqmhqqqq qqpptlppgs qpipptgaag pptvhglavp |
| 1021 | paavasappg sgappgslgp seqigqagtt agpqqpqqag apqpgavppg vpppgphgps |
| 1081 | pfpnqptpps mmpgavpgsg hpgvadpgtp lppdptapsp gtvtpvpppq |

SEQ ID NO: 76 Mouse SMARCC2 cDNA Sequence Variant 3 (NM_198160.2, CDS:
92-3391)

| | |
|---|---|
| 1 | gtggcggcgg gaggcggcgg gaggcgggcg gaggaggagg cgggagctga gctgagcggg |
| 61 | gcgggcggcg gcggggcccg agcccgagaa gatggcggtg cggaagaagg acggcggccc |
| 121 | caacgtgaag tactacgagg ccgcggacac cgtgacccag ttcgacaacg tgcggctctg |
| 181 | gctcggcaag aactacaaga agtacataca agcagaaccg ccaaccaaca agtctctgtc |
| 241 | cagcctggtg gtgcagttgc tccagtttca ggaagaggtt tttggcaaac atgtcagcaa |
| 301 | cgcaccgctt actaaactgc cgatcaaatg tttcctagat ttcaaagcag gaggatccct |
| 361 | ctgccatatt cttgcagctg cctacaaatt caagagtgac cagggatggc ggcgttacga |
| 421 | tttccagaat ccatcacgca tggaccgcaa tgtggaaatg ttcatgacca ttgagaagtc |
| 481 | cttggtacag aataattgcc tgtcacgacc taacattttc ctctgcccag aaattgagcc |
| 541 | caaactgcta gggaaattaa aagacattgt taagagacac cagggaacca tctctgagga |
| 601 | taagagcaat gcctcccatg ttgtgtatcc tgtcccaggg aacctagaag aagaggaatg |
| 661 | ggtacggcca gtcatgaaga gggataaaca ggttcttctg cactggggct actatcctga |
| 721 | cagctacgac acgtggatcc cagcgagtga aattgaagca tctgtggagg acgctcccac |
| 781 | tcctgagaaa ccgaggaagg tccatgcgaa gtggatcctc gacaccgaca cattcaacga |
| 841 | gtggatgaat gaggaagact acgaagtcag tgacgacaaa agcccagtct cccgcaggaa |
| 901 | gaagatctca gccaagacgc tgacagacga ggtaaacagc ccagattcag acagacgaga |
| 961 | caagaagggg ggcaactata agaagaggaa gcgctctccc tctccttcac ccaccccaga |
| 1021 | ggctaagaag aaaaacgcta agaaaggacc ctcaacacct tataccaagt caaagcgagg |
| 1081 | ccacagagaa gaggaacaag aagacctgac aaaagacatg gatgagccct ctccagtccc |
| 1141 | aaacgtggaa gaggtgacac tccccaaaac agtcaacact aaaaaggact ctgagtcagc |
| 1201 | cccagtcaaa ggcggcacca tgactgacct ggatgaacag gacgatgaaa gcatggagac |
| 1261 | caccggcaag gacgaggatg agaacagcac gggcaacaaa ggcgagcaga cgaagaaccc |
| 1321 | ggacctgcat gaggacaatg tgaccgagca gacccaccac atcatcatcc ccagctacgc |
| 1381 | cgcctggttt gactacaaca gcgtccatgc cattgaacgg agggctcttc ctgagttctt |
| 1441 | caacggcaag aacaagtcta agactccaga gatctacctg gcgtatcgga acttcatgat |
| 1501 | tgacacttac cgactgaatc cccaggagta tctaacatct actgcctgtc ggcggaattt |
| 1561 | ggcgggtgat gtctgcgcta tcatgagggt ccatgccttc ctggaacagt ggggtcttat |
| 1621 | taactaccag gtagatgctg agagccgacc aaccccaatg gggcctccac ccacctctca |
| 1681 | cttccatgtc ttggcggaca caccatcagg gctggttcct cttcagccga agcctccaca |
| 1741 | gcagagctct gcttcccagc aaatgctgaa cttccctgag aagggcaagg agaaaccagc |
| 1801 | agacatgcag aattttgggc tgcgcacaga catgtacaca aagaagaacg tcccctccaa |
| 1861 | gagcaaagct gcagcaagtg ccactcggga atggacggag caggagactc tgctgctcct |
| 1921 | ggaggctttg gaaatgtaca aggacgactg gaacaaagta tctgagcacg tgggaagccg |
| 1981 | cacgcaggac gagtgcatct tgcattttct ccgccttccc attgaagacc catacctgga |
| 2041 | ggactcggag gcttctctag gccctctggc ctaccaaccc atccccttca gtcagtcagg |
| 2101 | caaccctgtt atgagcaccg ttgccttcct ggcctctgtc gtcgatcccc gagttgcctc |
| 2161 | tgctgctgcg aagtcagccc tagaagagtt ctcaaaaatg aaggaagagg tgcccacagc |
| 2221 | tttggtggaa gcccacgtgc gtaaggtcga agaagcggcc aaagtcacag gcaaggccga |
| 2281 | cccagccttt ggtctggaga gtagcggcat cgcagggact gcctctgatg agcctgagcg |
| 2341 | cattgaggaa agcgggactg aggaggcacg gccagagggc caggcagcag atgagaagaa |
| 2401 | ggagcctaag gaaccacggg aaggaggggg cgctgtggag gaagaagcaa aggaggaaat |
| 2461 | aagtgaggtc cccaagaaag atgaagagaa agggaaagaa ggtgacagtg agaaggagtc |
| 2521 | tgagaagagt gacggggacc cgatagttga tcctgagaaa gacaaggaac caacagaagg |
| 2581 | gcaggaggaa gtgctaaagg aagtggcaga gccagagggg gagaggaaaa ccaaggtgga |
| 2641 | gcgtgacatt ggtgaaggca acctgtccac agctgcagcc gcagccctgg ccgctgctgc |
| 2701 | agtcaaggcc aagcacttgg ctgcagttga ggagagaaag atcaagtctt tggtggctct |
| 2761 | gctggtagag acccaaatga agaaactaga gatcaaactc cgacattttg aggagctgga |
| 2821 | gacaataatg gaccgggagc gagaggcgct ggaataccag aggcagcagc tcctggccga |
| 2881 | ccggcaagcc ttccacatgg agcagctgaa gtatgcagag atgagggccc ggcagcagca |
| 2941 | cttccagcag atgcaccagc agcagcagca gcagccacca accttgcccc caggctccca |
| 3001 | gcccatacct cccaccgggg ctgctggacc acctacagtc catggtctag ctgtgcctcc |
| 3061 | agccgctgtg gcctctgccc ctcctggcag tggggcccct cctggaagct tgggcccttc |
| 3121 | tgaacagatt gggcaggcag ggacaactgc agggccacag cagccacaac aagctggagc |
| 3181 | ccctcagcct ggggcagtcc caccaggggt acccccccct ggaccccatg gcccctcacc |
| 3241 | gttccccaac caaccaactc ctccctcaat gatgccaggg gcagtgccag gcagcgggca |
| 3301 | cccaggcgtg gcggacccag gcaccccgct gcctccagac cccacagctc caagcccagg |
| 3361 | cacagtcacc cctgtgccac ctccacagtg aggaaccagc cagccatctc tccccctcac |
| 3421 | tccccatgga gatcacagtt ccaggaacag ccctccccca ctactgggac cctccctcag |
| 3481 | cctgaagagt tcatcactac gtaaggaaag ctcctcctgc cccctcacca cccccaccat |
| 3541 | gcccagcaga ggtgtgcagt tttatatcca attattatcc acggacttct gactaaaaga |
| 3601 | tgtttctaat gcctgggaga gagaatagga gggaaagatg tttatacgag gttctactaa |
| 3661 | ctggttctga gggtctaccc cttcagaatt actgcatttt tgaagtgata acatgaaaat |
| 3721 | gaaacccttt aaaagggagg ttttaaaaaa agacacttcg gagcccacaa aaaaagaact |
| 3781 | tttttaatta ttattattat tattttgagg ggaaagggca ggttttaaga ggaattaaat |
| 3841 | ttctggggca aggtgtgagg tggaataggg caccgagcct gtctccctga gcccttggca |
| 3901 | gtgctgagtc agctcccctc acccattcca gtttattcat acaaatccct cctgctgctc |
| 3961 | gtcatggttg ctgttttagg cccagttcag ccaatgacct tttcctccag tcagctttgt |
| 4021 | gtttgtgttt aagtcacctg cttactcgtc agcgtctgtg tacttgtggg aaatgtagtt |
| 4081 | ttcggggatt ctgtggtagg aaatagagga agaaggggcc tcagttgggc tcttcttcct |
| 4141 | gctttcctag ttgtatctgt gagtgcccaa caggcatcag agggggagct ctaagaggat |
| 4201 | ggggggcctg cagaccctca agtttgaaaa gcacttaagc acctactttt gacagtggga |
| 4261 | cagtctgcta acttctgccc ccaccaacca agcctgacag aacccagtga tagctaggag |
| 4321 | ttccccaaat gaggacaaag atttgggagc agtgcagcgt gcctctgcac tccaggtctt |
| 4381 | cctcttcacc ccctacttgg aggcagacac aattccaggc cgcaccagag cctggcccct |
| 4441 | cccaccaggc gctttgctcc ttctgtccca gcgtctcctt cctctgcatc tccacacctt |
| 4501 | tcttctgttc aaagtcttct gtaaaatttt ctttccttct ttgttctttt ctttttcctt |
| 4561 | ttttttttat aaattaattt gctttcagtt ccaaaaaaaa aaaaaaaaaa aaaaaaaaaa |
| 4621 | aa |

SEQ ID NO: 77 Mouse SMARCC2 Amino Acid Sequence Isoform 3 (NP_937803.1)

| | |
|---|---|
| 1 | mavrkkdggp nvkyyeaadt vtqfdnvrlw lgknykkyiq aepptnksls slvvqllqfq |
| 61 | eevfgkhvsn apltklpikc fldfkaggsl chilaaaykf ksdqgwrryd fqnpsrmdrn |
| 121 | vemfmtieks lvqnnclsrp niflcpeiep kllgklkdiv krhqgtised ksnashvvyp |
| 181 | vpgnleeeew vrpvmkrdkq vllhwgyypd sydtwipase ieasvedapt pekprkvhak |
| 241 | wildtdtfne wmneedyevs ddkspvsrrk kisaktltde vnspdsdrrd kkggnykkrk |
| 301 | rspspsptpe akkknakkgp stpytkskrg hreeeqedlt kdmdepspvp nveevtlpkt |
| 361 | vntkkdsesa pvkggtmtdl deqddesmet tgkdedenst gnkgeqtknp dlhednvteq |
| 421 | thhiiipsya awfdynsvha ierralpeff ngknksktpe iylayrnfmi dtyrlnpqey |
| 481 | ltstacrrnl agdvcaimrv hafleqwgli nyqvdaesrp tpmgppptsh fhvladtpsg |
| 541 | lvplqpkppq qssasqqmln fpekgkekpa dmqnfglrtd mytkknvpsk skaaasatre |
| 601 | wteqetllll ealemykddw nkvsehvgsr tqdecilhfl rlpiedpyle dseaslgpla |
| 661 | yqpipfsqsg npvmstvafl asvvdprvas aaaksaleef skmkeevpta lveahvrkve |
| 721 | eaakvtgkad pafglessgi agtasdeper ieesgteear pegqaadekk epkepreggg |
| 781 | aveeeakeei sevpkkdeek gkegdsekes eksdgdpivd pekdkepteg qeevlkevae |
| 841 | pegerktkve rdigegnlst aaaaalaaaa vkakhlaave erkikslval lvetqmkkle |
| 901 | iklrhfeele timdrereal eyqrqqllad rqafhmeqlk yaemrarggh fqqmhqqqqq |
| 961 | qpptlppgsq pipptgaagp ptvhglavpp aavasappgs gappgslgps eqigqagtta |
| 1021 | gpqqpqqaga pqpgavppgv pppgphgpsp fpnqptppsm mpgavpgsgh pgvadpgtpl |
| 1081 | ppdptapspg tvtpvpppq |

SEQ ID NO: 78 Human SMARCD1 cDNA Sequence Variant 1 (NM_003076.4,
CDS: 171-1718)

| | |
|---|---|
| 1 | agcacgcctt ttccgctagt cgccccgctc tatcccatag tctcgctgcc ctgagcctcc |
| 61 | cgtgccggcc ggccggccgg gggaacaggc gggcgctcgg ggggcgctcg gggggcgggg |
| 121 | ggagttccgg ttccggttct ttgtgcggct gcatcggcgg ctccgggaag atggcggccc |
| 181 | gggcgggttt ccagtctgtg gctccaagcg gcggcgccgg agcctcagga ggggcgggcg |
| 241 | cggctgctgc cttgggcccg ggcggaactc cggggcctcc tgtgcgaatg ggcccggctc |
| 301 | cgggtcaagg gctgtaccgc tccccgatgc ccggagcggc ctatccgaga ccaggtatgt |
| 361 | tgccaggcag ccgaatgaca cctcagggac cttccatggg accccctggc tatgggggga |
| 421 | acccttcagt ccgacctggc ctggcccagt cagggatgga tcagtcccgc aagagacctg |
| 481 | cccctcagca gatccagcag gtccagcagc aggcggtcca aaatcgaaac cacaatgcaa |
| 541 | agaaaaagaa gatggctgac aaaattctac ctcaaaggat tcgtgaactg gtaccagaat |
| 601 | cccaggccta tatggatctc ttggcttttg aaaggaaact ggaccagact atcatgagga |
| 661 | aacggctaga tatccaagag gccttgaaac gtcccatcaa gcaaaaacgg aagctgcgaa |
| 721 | ttttcatttc taacactttc aatccggcta agtcagatgc cgaggatggg gaagggacgg |
| 781 | tggcttcctg ggagcttcgg gtagaaggac ggctcctgga ggattcagcc ttgtccaaat |
| 841 | atgatgccac taaacaaaag aggaagttct cttccttttt taagtccttg gtgattgaac |
| 901 | tggacaaaga cctgtatggg ccagacaacc atctggtaga atggcacagg accgccacta |
| 961 | cccaggagac cgatggcttt caggtgaagc ggccgggaga cgtgaatgta cggtgtactg |
| 1021 | tcctactgat gctggattac cagcctcccc agtttaaatt agacccccgc ctagctcgac |
| 1081 | tcctgggcat ccatacccag actcgtccag tgatcatcca agcactgtgg caatatatta |
| 1141 | agacacataa gctccaggac cctcacgagc gggagtttgt catctgtgac aagtacctgc |
| 1201 | agcagatctt tgagtctcaa cgtatgaagt tttcagagat ccctcagcgg ctccatgcct |
| 1261 | tgcttatgcc accagaacct atcatcatta atcatgtcat cagtgttgac ccgaatgatc |
| 1321 | agaaaaagac agcttgttat gacattgatg ttgaagtgga tgacaccttg aagacccaga |
| 1381 | tgaattcttt tctgctgtcc actgccagcc aacaggagat tgctactcta gacaacaaga |
| 1441 | tccatgagac aatagaaacc atcaaccagc tgaagactca gcgggagttc atgctgagct |
| 1501 | ttgccagaga ccctcagggt ttcatcaatg actggcttca gtcccagtgc agggacctca |
| 1561 | agacaatgac tgatgtggtg ggtaacccag aggaggagcg ccgagctgag ttctacttcc |
| 1621 | agccctgggc tcaggaggct gtgtgccgat acttctactc caaggtgcag cagagacgac |
| 1681 | aagaattaga gcaagccctg ggaatccgga atacataggg cctctcccac agccctgatt |
| 1741 | cgactgcacc aattcttgat ttgggccctg tgctgcctgc ctcatagtat ctgccttggt |
| 1801 | cttgcttggg gcgttccagg ggatgctgtt ggttcaagga caacaccaga atgaagaggg |
| 1861 | tctcacaaga cacctgttat cctcttcttt caccctatct cttcccaccc ccagcttccc |
| 1921 | tttgccccac aaagttccca tgtgcctgta ccctcccctg gtctacatag gacctctaga |
| 1981 | tagtgttaga gagagaacat gtagtggtaa tgagtgcttg gaatggattg ggcctcaggc |
| 2041 | caggtggtct tcaaggggac cagctaactg atcctgccct tcagagaccc aggagttggg |
| 2101 | agctttcgct ccttctccaa gactcaggcc tgtgggcact ctataagcta gttgatcttg |
| 2161 | gctctcctga taacagaatc caatttcctt ccttccctcc acaggtttgg aacaaactct |
| 2221 | cccttcactt gttgccctgt agcactacag aaaccctggt tcttgggctc cactgagccc |
| 2281 | caggtcagtc cccagccctc tgggttggcc tgctgtcagt gcttctctca ctccttagtt |
| 2341 | ggggtccaca tcagtattgg agttttgttc tttattgctc cctcccagac actccctgtg |
| 2401 | gctgcccttt gtgattccct cagatctgcc ctaatcccgg gcatttgggt gggggaatct |
| 2461 | tgcctttccc tttcagagcc ccagggatct catctgggga actgtcattg ccagcagagg |
| 2521 | ctgttccttc ctgctgtttg gagatgtgac tcattcattc actcactcca ccctgcctct |
| 2581 | gcatccctta atggagaaac gggcctaaaa ccaaacgggt aaaaagccct gggccatccc |
| 2641 | tgtcttcctg tcccttgtct gcccagttga cacctactgg tgacttctag ggcactgagg |
| 2701 | agtgaaagcg cctagggctg gagaatagcg ctgagttggg tttgtgactc ttccctctcc |
| 2761 | ctgcctcaca ggattgtgac tccccagccc ctgccctcaa agcttcagac ccctcaggta |
| 2821 | gcagcaggac cttgtgatct tggccccttg gatctgagat ggtttttgca tctttccagg |
| 2881 | agagcctcac attcttcttc caggttgtat cacccccgag ttagcatatc ccaggctcgc |
| 2941 | agactcaaca cagcaagggt gggagacagc tgggcacaaa gggggaattc cgttcagcat |
| 3001 | gggctctaaa cccacagaac tgacaaagcc cctgcttccc caccccctcc tcaggctcct |
| 3061 | gcgagcacac ccccaccccc aaatccctcc ctgttctaca ctggggacag cagaattttc |
| 3121 | tccccgtctt ccccttcctg ccattttccc tcccttgaaa ggttgacact ggacaacctt |
| 3181 | ggggcagctg agccctggcc gcctcctggc tggaaccatg agaaggaagc tcagtacttc |
| 3241 | ccacagtgtc cctgttgata actgttttta ttaactgaat tgtttttttc atggaccaaa |
| 3301 | cttttttttg tactgtcccc ttattgatgt tacccagttt taataaaaga atcttctgaa |
| 3361 | ggatgggtcc tcctacctac tgtgagagag ctcttccctg agctcttctt ccttcaatac |
| 3421 | cattagccaa a |

SEQ ID NO: 79 Human SMARCD1 Amino Acid Sequence Isoform A
(NP_003067.3)

| | |
|---|---|
| 1 | maaragfqsv apsggagasg gagaaaalgp ggtpgppvrm gpapgqglyr spmpgaaypr |
| 61 | pgmlpgsrmt pqgpsmgppg yggnpsvrpg laqsgmdqsr krpapqqiqq vqqqavqnrn |
| 121 | hnakkkkmad kilpqrirel vpesqaymdl laferkldqt imrkrldiqe alkrpikqkr |
| 181 | klrifisntf npaksdaedg egtvaswelr vegrlledsa lskydatkqk rkfssffksl |
| 241 | vieldkdlyg pdnhlvewhr tattqetdgf qvkrpgdvnv rctvllmldy qppqfkldpr |
| 301 | larllgihtq trpviiqalw qyikthklqd pherefvicd kylqqifesq rmkfseipqr |
| 361 | lhallmppep iiinhvisvd pndqkktacy didvevddtl ktqmnsflls tasqqeiatl |
| 421 | dnkihetiet inqlktqref mlsfardpqg findwlqsqc rdlktmtdvv gnpeeerrae |
| 481 | fyfqpwaqea vcryfyskvq qrrqeleqal girnt |

SEQ ID NO: 80 Human SMARCD1 cDNA Sequence Variant 2 (NM 139071.2,
CDS: 171-1595)

| | |
|---|---|
| 1 | agcacgcctt ttccgctagt cgccccgctc tatcccatag tctcgctgcc ctgagcctcc |
| 61 | cgtgccggcc ggccggccgg gggaacaggc gggcgctcgg ggggcgctcg gggggcgggg |
| 121 | ggagttccgg ttccggttct ttgtgcggct gcatcggcgg ctccgggaag atggcggccc |
| 181 | gggcgggttt ccagtctgtg gctccaagcg gcggcgccgg agcctcagga ggggcgggcg |
| 241 | cggctgctgc cttgggcccg ggcggaactc cggggcctcc tgtgcgaatg ggcccggctc |
| 301 | cgggtcaagg gctgtaccgc tccccgatgc ccggagcggc ctatccgaga ccaggtatgt |
| 361 | tgccaggcag ccgaatgaca cctcagggac cttccatggg accccctggc tatgggggga |
| 421 | acccttcagt ccgacctggc ctggcccagt cagggatgga tcagtcccgc aagagacctg |
| 481 | cccctcagca gatccagcag gtccagcagc aggcggtcca aaatcgaaac cacaatgcaa |
| 541 | agaaaaagaa gatggctgac aaaattctac ctcaaaggat tcgtgaactg gtaccagaat |
| 601 | cccaggccta tatggatctc ttggcttttg aaaggaaact ggaccagact atcatgagga |
| 661 | aacggctaga tatccaagag gccttgaaac gtcccatcaa gcaaaaacgg aagctgcgaa |
| 721 | ttttcatttc taacactttc aatccggcta agtcagatgc cgaggatggg gaagggacgg |
| 781 | tggcttcctg ggagcttcgg gtagaaggac ggctcctgga ggattcagcc ttgtccaaat |
| 841 | atgatgccac taaacaaaag aggaagttct cttccttttt taagtccttg gtgattgaac |
| 901 | tggacaaaga cctgtatggg ccagacaacc atctggtaga atggcacagg accgccacta |
| 961 | cccaggagac cgatggcttt caggtgaagc ggccgggaga cgtgaatgta cggtgtactg |
| 1021 | tcctactgat gctggattac cagcctcccc agtttaaatt agacccccgc ctagctcgac |
| 1081 | tcctgggcat ccatacccag actcgtccag tgatcatcca agcactgtgg caatatatta |
| 1141 | agacacataa gctccaggac cctcacgagc gggagtttgt catctgtgac aagtacctgc |
| 1201 | agcagatctt tgagtctcaa cgtatgaagt tttcagagat ccctcagcgg ctccatgcct |
| 1261 | tgcttatgcc accagaacct atcatcatta atcatgtcat cagtgttgac ccgaatgatc |
| 1321 | agaaaaagac agcttgttat gacattgatg ttgaagtgga tgacaccttg aagacccaga |
| 1381 | tgaattcttt tctgctgtcc actgccagcc aacaggagat tgctactcta gacaacaaga |
| 1441 | caatgactga tgtggtgggt aacccagagg aggagcgccg agctgagttc tacttccagc |
| 1501 | cctgggctca ggaggctgtg tgccgatact tctactccaa ggtgcagcag agacgacaag |
| 1561 | aattagagca agccctggga atccggaata catagggcct ctcccacagc cctgattcga |
| 1621 | ctgcaccaat tcttgatttg ggccctgtgc tgcctgcctc atagtatctg ccttggtctt |
| 1681 | gcttggggcg ttccagggga tgctgttggt tcaaggacaa caccagaatg aagagggtct |
| 1741 | cacaagacac ctgttatcct cttctttcac cctatctctt cccaccccca gcttcccttt |
| 1801 | gccccacaaa gttcccatgt gcctgtaccc tcccctggtc tacataggac ctctagatag |
| 1861 | tgttagagag agaacatgta gtggtaatga gtgcttggaa tggattgggc ctcaggccag |
| 1921 | gtggtcttca aggggaccag ctaactgatc ctgcccttca gagacccagg agttgggagc |
| 1981 | tttcgctcct tctccaagac tcaggcctgt gggcactcta taagctagtt gatcttggct |
| 2041 | ctcctgataa cagaatccaa tttccttcct tccctccaca ggtttggaac aaactctccc |
| 2101 | ttcacttgtt gccctgtagc actacagaaa ccctggttct tgggctccac tgagccccag |
| 2161 | gtcagtcccc agccctctgg gttggcctgc tgtcagtgct tctctcactc cttagttggg |
| 2221 | gtccacatca gtattggagt tttgttcttt attgctccct cccagacact ccctgtggct |
| 2281 | gccctttgtg attccctcag atctgcccta atcccgggca tttgggtggg ggaatcttgc |
| 2341 | ctttcccttt cagagcccca gggatctcat ctggggaact gtcattgcca gcagaggctg |
| 2401 | ttccttcctg ctgtttggag atgtgactca ttcattcact cactccaccc tgcctctgca |
| 2461 | tcccttaatg gagaaacggg cctaaaacca aacgggtaaa aagccctggg ccatccctgt |
| 2521 | cttcctgtcc cttgtctgcc cagttgacac ctactggtga cttctagggc actgaggagt |
| 2581 | gaaagcgcct agggctggag aatagcgctg agttgggttt gtgactcttc cctctccctg |
| 2641 | cctcacagga ttgtgactcc ccagcccctg ccctcaaagc ttcagacccc tcaggtagca |
| 2701 | gcaggacctt gtgatcttgg ccccttggat ctgagatggt ttttgcatct ttccaggaga |
| 2761 | gcctcacatt cttcttccag gttgtatcac ccccgagtta gcatatccca ggctcgcaga |
| 2821 | ctcaacacag caagggtggg agacagctgg gcacaaaggg ggaattccgt tcagcatggg |
| 2881 | ctctaaaccc acagaactga caaagcccct gcttccccac cccctcctca ggctcctgcg |
| 2941 | agcacacccc cacccccaaa tccctccctg ttctacactg gggacagcag aattttctcc |
| 3001 | ccgtcttccc cttcctgcca ttttccctcc cttgaaaggt tgacactgga caaccttggg |
| 3061 | gcagctgagc cctggccgcc tcctggctgg aaccatgaga aggaagctca gtacttccca |
| 3121 | cagtgtccct gttgataact gtttttatta actgaattgt ttttttcatg gaccaaactt |
| 3181 | ttttttgtac tgtcccctta ttgatgttac ccagttttaa taaaagaatc ttctgaagga |
| 3241 | tgggtcctcc tacctactgt gagagagctc ttccctgagc tcttcttcct tcaataccat |
| 3301 | tagccaaa |

SEQ ID NO: 81 Human SMARCD1 Amino Acid Sequence Isoform B
(NP_620710.2)

| | |
|---|---|
| 1 | maaragfqsv apsggagasg gagaaaalgp ggtpgppvrm gpapgqglyr spmpgaaypr |
| 61 | pgmlpgsrmt pqgpsmgppg yggnpsvrpg laqsgmdqsr krpapqqiqq vqqqavqnrn |
| 121 | hnakkkkmad kilpqrirel vpesqaymdl laferkldqt imrkrldiqe alkrpikqkr |
| 181 | klrifisntf npaksdaedg egtvaswelr vegrlledsa lskydatkqk rkfssffksl |
| 241 | vieldkdlyg pdnhlvewhr tattqetdgf qvkrpgdvnv rctvllmldy qppqfkldpr |
| 301 | larllgihtq trpviiqalw qyikthklqd pherefvicd kylqqifesq rmkfseipqr |
| 361 | lhallmppep iiinhvisvd pndqkktacy didvevddtl ktqmnsflls tasqqeiatl |
| 421 | dnktmtdvvg npeeerraef yfqpwaqeav cryfyskvqq rrqeleqalg irnt |

SEQ ID NO: 82 Mouse SMARCD1 cDNA Sequence (NM 031842.2, CDS: 36-1583)

| | |
|---|---|
| 1 | gttctttgtg cagctgcagc ggcggctccg ggaagatggc ggcccgggcg ggtttccagt |
| 61 | ctgtggctcc gagcggcggc gcgggagcct caggaggagc gggcgtggcg gctgctctgg |
| 121 | gcccgggcgg aactcccggg cctcccgtgc gaatgggccc ggcgccgggt caagggctgt |
| 181 | accgctctcc gatgcccggg gcggcctatc cgagaccagg tatgctgcca ggtagccgaa |
| 241 | tgacacctca gggaccttcc atgggacctc ctggctatgg ggggaaccct tcagtccgac |
| 301 | ctggtctggc ccagtcaggg atggaccagt cccgcaagag acctgcacct caacagatcc |
| 361 | agcaggtcca gcagcaggcg gtccaaaatc gaaatcacaa tgcaaagaaa aagaagatgg |
| 421 | ctgacaaaat cctacctcaa aggattcggg aactggtccc agaatcacag gcctacatgg |
| 481 | atctcctggc ttttgaaagg aaactggacc agactattat gaggaagcgg ctagatatcc |
| 541 | aggaggcctt gaaacgtccc atcaagcaaa aacggaagct gcgaattttc atttctaaca |
| 601 | cgttcaatcc ggctaagtcg gacgcggagg atggggaagg gacggtggct tcctgggagc |
| 661 | tccgggtaga aggccggctc ctggaggacg cggccttgtc caaatatgac gccaccaagc |
| 721 | aaaagagaaa gttctcttcc ttttttaagt ccttggtgat cgaactggac aaagacctct |
| 781 | atggcccaga caaccatctg gtagaatggc acaggaccgc cactacccag gagaccgatg |
| 841 | gcttccaggt gaagcggcca ggagatgtga atgtacggtg tactgtcctg ctgatgctgg |
| 901 | actaccagcc cccccagttt aaattagacc ctcgcctggc tcggctcttg ggcatccata |
| 961 | cccagacacg tccagtgatc atccaagcac tgtggcagta tattaaaaca cacaagctcc |
| 1021 | aggaccctca cgagcgagag tttgttctct gtgacaagta cctccagcag atctttgaat |
| 1081 | ctcagcggat gaagttctca gagatccctc agcggctcca cgccttgctt atgccaccag |
| 1141 | agcccatcat catcaatcat gtcatcagtg tggacccaaa tgaccagaaa aagaccgcgt |
| 1201 | gctatgacat tgacgtggag gtggatgaca ctctgaagac ccagatgaac tctttcctgt |
| 1261 | tgtccactgc cagccagcag gagatcgcca ctctagacaa caagatccat gagacgatag |
| 1321 | agaccatcaa ccagctgaag acccagcgag agttcatgtt gagctttgcc cgagaccctc |
| 1381 | agggtttcat caatgattgg cttcagtccc agtgcaggga cctcaagacg atgactgatg |
| 1441 | tggtgggtaa cccggaagag gagcgtcgtg ctgagttcta cttccagccc tgggctcagg |
| 1501 | aggctgtgtg ccgatacttc tactccaagg tgcagcagag gcggcaagag ttagagcaag |
| 1561 | ccctgggaat ccgaaacaca tagggcctct gtggccctag cctggctgca ccgattcctt |
| 1621 | gggccctgtg ctgcctgcct cagtgtacct gtcttggtct tgcttgaggc attccagggg |
| 1681 | acttggcttc aggacagtgt cacaatgaag agggtgtcac atttctgtct cacagtcacc |
| 1741 | tgttatcccg tcctgtaccc cagtcgtccc ccgtcccgtc gtgtcccccc ctcaccccac |
| 1801 | cccgcctcag ctcctcccca tcaggctcct gtgtgcctct acctccctat cctacatagg |
| 1861 | acctctagat agtgttagag aaccacagag tgggggcctc ctgaggtcag gtggtcttga |
| 1921 | gggagaccag ctacactgat cctgcccttg tcaggagacc taggccttgg gagctatccc |
| 1981 | tgtctgagcc tcaggcctag ggcagtctgt aagctagctg accttggccc tcccggtagc |
| 2041 | ttgacttctt ccctcccctc cgcaggttgg ggcagaggct cctttacctc tggcagtaaa |
| 2101 | ggagcctggg cttcactgag ccccgggttg gtcccctgcc ctctggactt aacctgctgt |
| 2161 | ctcagtgtcc tctgacccct taggggtcca tgtcagtatt ggagtgtgtg ttgaattgtt |
| 2221 | gctccctccc acacactccc gtagccgccc agtttaggat ttccctacac ctgccctaac |
| 2281 | ccacgctttt gggttgggga tcttgccttt ccttgtcatt cccagcagag actgttcctt |
| 2341 | cctgctgtta gaggagtggc ttgtttattc actccaccct gccccctcct gtaaatggag |
| 2401 | aaacaggcct gaaatcaaac gggtaaagcc ctaggccatc cctgtcttcc tgtcccatgt |
| 2461 | ctgcccagtt gaatcccact ggtggcttcc cgggcactga ggagtaaaag cgcctagggc |
| 2521 | tggagaatag gtctgaaatg ggtttgtgac tccccacccc ctgccctgcc ctcaaagctt |
| 2581 | cagacccctc agggagcagc aggatgtggg atcgaggccc cttgggacag atgctttgaa |
| 2641 | tcttccaggg aagcctccga ttcttccagg tttgtcaccc ggagttagca tgtcccaggc |
| 2701 | tcgcagacaa cactgcaggg tgggagacag ctgggcacag ggggattctg ttgagcatgg |
| 2761 | gctctgaacc cacagaactg acaaagcccc tgcttcccca cccccacctc aggctcctgc |
| 2821 | gagcagtgct cctgcaccct tcccagcctg ttctgtactg gggacagcag tcttctccct |
| 2881 | gtcctcccat gtcctatatc cacccctccc cttggaaggt cctccccaca gtgacactgg |
| 2941 | acagccctgg ggcagctgag ccccagcctg gcttctggct ggaagcgcga tgaggagact |
| 3001 | tagcactcca cagtgtccct ggtggtaact gttcttatta actgattgtg ttttgttttg |
| 3061 | ttttgttttg ttttcatgga ccaaaatttt ttttgtactg tctccttaac tgatgtcacc |
| 3121 | cagttttaat aaaagacttc taaagagcag gtc |

SEQ ID NO: 83 Mouse SMARCD1 Amino Acid Sequence (NP_114030.2)

| | |
|---|---|
| 1 | maaragfqsv apsggagasg gagvaaalgp ggtpgppvrm gpapgqglyr spmpgaaypr |
| 61 | pgmlpgsrmt pqgpsmgppg yggnpsvrpg laqsgmdqsr krpapqqiqq vqqqavqnrn |
| 121 | hnakkkkmad kilpqrirel vpesqaymdl laferkldqt imrkrldiqe alkrpikqkr |
| 181 | klrifisntf npaksdaedg egtvaswelr vegrlledaa lskydatkqk rkfssffksl |
| 241 | vieldkdlyg pdnhlvewhr tattqetdgf qvkrpgdvnv rctvllmldy qppqfkldpr |
| 301 | larllgihtq trpviiqalw qyikthklqd pherefvlcd kylqqifesq rmkfseipqr |
| 361 | lhallmppep iiinhvisvd pndqkktacy didvevddtl ktqmnsflls tasqqeiatl |
| 421 | dnkihetiet inqlktqref mlsfardpqg findwlqsqc rdlktmtdvv gnpeeerrae |
| 481 | fyfqpwaqea vcryfyskvq qrrqeleqal girnt |

SEQ ID NO: 84 Human SMARCD2 cDNA Sequence Variant 1 (NM_001098426.1
CDS: 318-1913)

| | |
|---|---|
| 1 | gttgggcggg gcagggagtt cgtagccgcc tctgggtaac tcgactcggg cggccaaacc |
| 61 | tccggaggcc ggggacggaa ggcgggcccg cagcagatcc tggatccgga atctcccggg |
| 121 | caggagcgga atctgtcccg aaccgggtct gtgaggaact cgcgaacttg gattaggaaa |
| 181 | tcccggagcc cggatcgaca aatcccggaa cccggaatta agatcgccaa gtcccggatc |
| 241 | gcggagcaca gagcacggag tggactcgac gcggagcccg gagtccggat cgcggcaccg |
| 301 | cgggacggga cggagcgatg tcgggccgag gcgcgggcgg gttcccgctg cccccgctaa |
| 361 | gccctggcgg cggcgccgtg gctgcggccc tgggagcgcc gcctcccccc gcgggacccg |
| 421 | gcatgctgcc cggaccggcg ctccggggac cgggtccggc aggaggcgtg gggggccccg |
| 481 | gggccgccgc cttccgcccc atgggccccg cgggccccgc ggcgcagtac cagcgacctg |
| 541 | gcatgtcacc agggaaccgg atgcccatgg ctggcttgca ggtgggaccc cctgctggct |
| 601 | ccccatttgg tgcagcagct ccgcttcgac ctggcatgcc acccaccatg atggatccat |
| 661 | tccgaaaacg cctgcttgtg ccccaggcgc agcctcccat gcctgcccag cgccgggggt |
| 721 | taaagaggag gaagatggca gataaggttc tacctcagcg aatccgggag cttgttccag |
| 781 | agtctcaggc gtacatggat ctcttggctt ttgagcggaa gctggaccag accattgctc |
| 841 | gcaagcggat ggagatccag gaggccatca aaaagcctct gacacaaaag cgaaagcttc |
| 901 | ggatctacat ttccaatacg ttcagtccca gcaaggcgga aggcgatagt gcaggaactg |
| 961 | cagggacccc tgggggaacc ccagcagggg acaaggtggc ttcctgggaa ctccgagtgg |
| 1021 | aaggaaaact gctggatgat cctagcaaac agaagaggaa gttttcttca ttctttaaga |
| 1081 | gcctcgtcat tgagctggac aaggagctgt acgggcctga caatcacctg gtggagtggc |
| 1141 | accggatgcc caccacccag gagacagatg gcttccaagt aaaacggcct ggagacctca |
| 1201 | acgtcaagtg caccctcctg ctcatgctgg atcatcagcc tccccagtac aaattggacc |
| 1261 | cccgattggc aaggctgctg ggagtgcaca cgcagacgag ggccgccatc atgcaggccc |
| 1321 | tgtggcttta catcaagcac aaccagctgc aggatgggca cgagcgggag tacatcaact |
| 1381 | gcaaccgtta cttccgccag atcttcagtt gtggccgact ccgtttctcc gagattccca |
| 1441 | tgaagctggc agggttgctg cagcatccag accccattgt catcaaccat gtcattagtg |
| 1501 | tcgaccctaa cgaccagaag aagacagcct gttacgacat cgatgtggag gtggacgacc |
| 1561 | cactgaaggc ccaaatgagc aattttctgg cctctaccac caatcagcag gagatcgcct |
| 1621 | cccttgatgt caagatccat gagaccattg agtccatcaa ccagctgaag acccagagag |
| 1681 | atttcatgct cagttttagc accgaccccc aggacttcat ccaggaatgg ctccgttccc |
| 1741 | agcgccgaga cctcaagatc atcactgatg tgattggaaa tcctgaggag gagagacgag |
| 1801 | ctgctttcta ccaccagccc tgggcccagg aagcagtagg caggcacatc tttgccaagg |
| 1861 | tgcagcagcg aaggcaggaa ctggaacagg tgctgggaat tcgcctgacc taactgctca |
| 1921 | gggatctttc ttcccagccc tggagcctgg agggagacca ccctctgggt ccttgctggg |
| 1981 | gccgcagaca cgtaggctgg ggtgaggagt gtctgctgtc accctctact ctccagcttt |
| 2041 | agtcttataa atgtagtgat aggattcctt gttgcttggt ccccaaagcc ttatactttt |
| 2101 | tgcattggct ttaattgggt tcagcagatg cctcctctgc ccccctgcag gcaggcccaa |
| 2161 | gtaggactgc tggaggctgt gctttgacat tgtaagacat ttccgaacca aaggctgctg |
| 2221 | ggtttgcatg tttacagact ccccctgggg cgagggtcag agctggctct ggggagctgg |
| 2281 | gctaggaaga ggaggtgcag cccagactct tcctagcctt tctaaaccaa agttctttgc |
| 2341 | cattcctaca agcccagcct tgctgctggt tttttccttt cctttgggta tttgcactat |
| 2401 | tttgggagca agttttctat gtgggagcca ctttttttgt acaggggtaa gttgggggtt |
| 2461 | ttcagggagc ctgttaggtg cctccttctt ttctttcctc aatctatgca agcggctctg |
| 2521 | gccgccatca tctcctggga tgccagaggg ctgcctctcc agcggcttgg gccggggagg |
| 2581 | ggacactcca gttctctagc atggcctgag gtatggggta tgtgcatgtg gaggccaggg |
| 2641 | taaggtgaat ggggaggctg ggaggactgg tgttgccctt tggagcttgg tgaggagggt |
| 2701 | gggcctaggg cttggcgagt gccacatctg gcaggtttgg aaatttccaa ataaatcctt |
| 2761 | ttgtctattg |

SEQ ID NO: 85 Human SMARCD2 Amino Acid Sequence Isoform 1
(NP_001091896.1)

| | |
|---|---|
| 1 | msgrgaggfp lpplspggga vaaalgappp pagpgmlpgp alrgpgpagg vggpgaaafr |
| 61 | pmgpagpaaq yqrpgmspgn rmpmaglqvg ppagspfgaa aplrpgmppt mmdpfrkrll |
| 121 | vpqaqppmpa qrrglkrrkm adkvlpqrir elvpesqaym dllaferkld qtiarkrmei |
| 181 | qeaikkpltq krklriyisn tfspskaegd sagtagtpgg tpagdkvasw elrvegklld |
| 241 | dpskqkrkfs sffkslviel dkelygpdnh lvewhrmptt qetdgfqvkr pgdlnvkctl |
| 301 | llmldhqppq ykldprlarl lgvhtqtraa imqalwlyik hnqlqdgher eyincnryfr |
| 361 | qifscgrlrf seipmklagl lqhpdpivin hvisvdpndq kktacydidv evddplkaqm |
| 421 | snflasttnq qeiasldvki hetiesinql ktqrdfmlsf stdpqdfiqe wlrsqrrdlk |
| 481 | iitdvignpe eerraafyhq pwaqeavgrh ifakvqqrrq eleqvlgirl t |

SEQ ID NO:86 Human SMARCD2 cDNA Sequence Variant 2 (NM_001330439.1
CDS: 96-1466)

| | |
|---|---|
| 1 | agtaccaggt gagcaaggag gacgcgagcg gacgggggcg agaggcgctg cgagggcgcc |
| 61 | cgggccggcg gctgaagggg cctcgacgac ctggcatgtc accagggaac cggatgccca |
| 121 | tggctggctt gcaggtggga ccccctgctg gctccccatt tggtgcagca gctccgcttc |
| 181 | gacctggcat gccacccacc atgatggatc cattccgaaa acgcctgctt gtgccccagg |
| 241 | cgcagcctcc catgcctgcc cagcgccggg ggttaaagag gaggaagatg gcagataagg |
| 301 | ttctacctca gcgaatccgg gagcttgttc cagagtctca ggcgtacatg gatctcttgg |
| 361 | cttttgagcg gaagctggac cagaccattg ctcgcaagcg gatggagatc caggaggcca |
| 421 | tcaaaaagcc tctgacacaa aagcgaaagc ttcggatcta catttccaat acgttcagtc |
| 481 | ccagcaaggc ggaaggcgat agtgcaggaa ctgcagggac ccctggggga accccagcag |
| 541 | gggacaaggt ggcttcctgg gaactccgag tggaaggaaa actgctggat gatcctagca |
| 601 | aacagaagag gaagttttct tcattcttta agagcctcgt cattgagctg gacaaggagc |
| 661 | tgtacgggcc tgacaatcac ctggtggagt ggcaccggat gcccaccacc caggagacag |
| 721 | atggcttcca agtaaaacgg cctggagacc tcaacgtcaa gtgcaccctc ctgctcatgc |
| 781 | tggatcatca gcctccccag tacaaattgg acccccgatt ggcaaggctg ctgggagtgc |
| 841 | acacgcagac gagggccgcc atcatgcagg ccctgtggct ttacatcaag cacaaccagc |
| 901 | tgcaggatgg gcacgagcgg gagtacatca actgcaaccg ttacttccgc cagatcttca |
| 961 | gttgtggccg actccgtttc tccgagattc ccatgaagct ggcagggttg ctgcagcatc |
| 1021 | cagaccccat tgtcatcaac catgtcatta gtgtcgaccc taacgaccag aagaagacag |
| 1081 | cctgttacga catcgatgtg gaggtggacg acccactgaa ggcccaaatg agcaattttc |
| 1141 | tggcctctac caccaatcag caggagatcg cctcccttga tgtcaagatc catgagacca |
| 1201 | ttgagtccat caaccagctg aagacccaga gagatttcat gctcagtttt agcaccgacc |
| 1261 | cccaggactt catccaggaa tggctccgtt cccagcgccg agacctcaag atcatcactg |
| 1321 | atgtgattgg aaatcctgag gaggagagac gagctgcttt ctaccaccag ccctgggccc |
| 1381 | aggaagcagt aggcaggcac atctttgcca aggtgcagca gcgaaggcag gaactggaac |
| 1441 | aggtgctggg aattcgcctg acctaactgc tcagggatct ttcttcccag ccctggagcc |
| 1501 | tggagggaga ccaccctctg ggtccttgct ggggccgcag acacgtaggc tggggtgagg |
| 1561 | agtgtctgct gtcaccctct actctccagc tttagtctta taaatgtagt gataggattc |
| 1621 | cttgttgctt ggtccccaaa gccttatact ttttgcattg gctttaattg ggttcagcag |
| 1681 | atgcctcctc tgcccccctg caggcaggcc caagtaggac tgctggaggc tgtgctttga |
| 1741 | cattgtaaga catttccgaa ccaaaggctg ctgggtttgc atgtttacag actccccctg |
| 1801 | gggcgagggt cagagctggc tctggggagc tgggctagga agaggaggtg cagcccagac |
| 1861 | tcttcctagc ctttctaaac caaagttctt tgccattcct acaagcccag ccttgctgct |
| 1921 | ggttttttcc tttcctttgg gtatttgcac tattttggga gcaagttttc tatgtgggag |
| 1981 | ccactttttt tgtacagggg taagttgggg gttttcaggg agcctgttag gtgcctcctt |
| 2041 | cttttctttc ctcaatctat gcaagcggct ctggccgcca tcatctcctg ggatgccaga |
| 2101 | gggctgcctc tccagcggct tgggccgggg aggggacact ccagttctct agcatggcct |
| 2161 | gaggtatggg gtatgtgcat gtggaggcca gggtaaggtg aatggggagg ctgggaggac |
| 2221 | tggtgttgcc ctttggagct tggtgaggag ggtgggccta gggcttggcg agtgccacat |
| 2281 | ctggcaggtt tggaaatttc caaataaatc cttttgtcta ttgaaaaaaa aaaaaaaaaa |
| 2341 | a |

SEQ ID NO: 87 Human SMARCD2 Amino Acid Sequence Isoform 2
(NP_001317368.1)

| | |
|---|---|
| 1 | mspgnrmpma glqvgppags pfgaaaplrp gmpptmmdpf rkrllvpqaq ppmpaqrrgl |
| 61 | krrkmadkvl pqrirelvpe sqaymdllaf erkldqtiar krmeiqeaik kpltqkrklr |
| 121 | iyisntfsps kaegdsagta gtpggtpagd kvaswelrve gkllddpskq krkfssffks |
| 181 | lvieldkely gpdnhlvewh rmpttqetdg fqvkrpgdln vkctlllmld hqppqykldp |
| 241 | rlarllgvht qtraaimqal wlyikhnqlq dghereyinc nryfrqifsc grlrfseipm |
| 301 | klagllqhpd pivinhvisv dpndqkktac ydidvevddp lkaqmsnfla sttnqqeias |
| 361 | ldvkihetie singlktqrd fmlsfstdpq dfiqewlrsq rrdlkiitdv ignpeeerra |
| 421 | afyhqpwage avgrhifakv qqrrqeleqv lgirlt |

SEQ ID NO: 88 Human SMARCD2 cDNA Sequence Variant 3 (NM_001330440.1,
CDS: 48-1499)

| | |
|---|---|
| 1 | agtgtgtgca aggcagagct gccaaacagg ccttgcaggc agcagccatg gggaggcggg |
| 61 | tgggggtgga ggtgactccc agatgggctc cacagaaatg tcagggagca aggcctcagc |
| 121 | gacctggcat gtcaccaggg aaccggatgc ccatggctgg cttgcaggtg ggaccccctg |
| 181 | ctggctcccc atttggtgca gcagctccgc ttcgacctgg catgccaccc accatgatgg |
| 241 | atccattccg aaaacgcctg cttgtgcccc aggcgcagcc tcccatgcct gcccagcgcc |
| 301 | gggggttaaa gaggaggaag atggcagata aggttctacc tcagcgaatc cgggagcttg |
| 361 | ttccagagtc tcaggcgtac atggatctct tggcttttga gcggaagctg gaccagacca |
| 421 | ttgctcgcaa gcggatggag atccaggagg ccatcaaaaa gcctctgaca caaaagcgaa |
| 481 | agcttcggat ctacatttcc aatacgttca gtcccagcaa ggcggaaggc gatagtgcag |
| 541 | gaactgcagg gacccctggg ggaaccccag caggggacaa ggtggcttcc tgggaactcc |
| 601 | gagtggaagg aaaactgctg gatgatccta gcaaacagaa gaggaagttt tcttcattct |
| 661 | ttaagagcct cgtcattgag ctggacaagg agctgtacgg gcctgacaat cacctggtgg |
| 721 | agtggcaccg gatgcccacc acccaggaga cagatggctt ccaagtaaaa cggcctggag |
| 781 | acctcaacgt caagtgcacc ctcctgctca tgctggatca tcagcctccc cagtacaaat |
| 841 | tggacccccg attggcaagg ctgctgggag tgcacacgca gacgagggcc gccatcatgc |
| 901 | aggccctgtg gctttacatc aagcacaacc agctgcagga tgggcacgag cgggagtaca |
| 961 | tcaactgcaa ccgttacttc cgccagatct tcagttgtgg ccgactccgt ttctccgaga |
| 1021 | ttcccatgaa gctggcaggg ttgctgcagc atccagaccc cattgtcatc aaccatgtca |
| 1081 | ttagtgtcga ccctaacgac cagaagaaga cagcctgtta cgacatcgat gtggaggtgg |
| 1141 | acgacccact gaaggcccaa atgagcaatt ttctggcctc taccaccaat cagcaggaga |
| 1201 | tcgcctccct tgatgtcaag atccatgaga ccattgagtc catcaaccag ctgaagaccc |
| 1261 | agagagattt catgctcagt tttagcaccg acccccagga cttcatccag gaatggctcc |
| 1321 | gttcccagcg ccgagacctc aagatcatca ctgatgtgat tggaaatcct gaggaggaga |
| 1381 | gacgagctgc tttctaccac cagccctggg cccaggaagc agtaggcagg cacatctttg |
| 1441 | ccaaggtgca gcagcgaagg caggaactgg aacaggtgct gggaattcgc ctgacctaac |
| 1501 | tgctcaggga tctttcttcc cagccctgga gcctggaggg agaccaccct ctgggtcctt |
| 1561 | gctggggccg cagacacgta ggctggggtg aggagtgtct gctgtcaccc tctactctcc |
| 1621 | agctttagtc ttataaatgt agtgatagga ttccttgttg cttggtcccc aaagccttat |
| 1681 | actttttgca ttggctttaa ttgggttcag cagatgcctc ctctgccccc ctgcaggcag |
| 1741 | gcccaagtag gactgctgga ggctgtgctt tgacattgta agacatttcc gaaccaaagg |
| 1801 | ctgctgggtt tgcatgttta cagactcccc ctggggcgag ggtcagagct ggctctgggg |
| 1861 | agctgggcta ggaagaggag gtgcagccca gactcttcct agcctttcta aaccaaagtt |
| 1921 | ctttgccatt cctacaagcc cagccttgct gctggttttt tcctttcctt tgggtatttg |
| 1981 | cactattttg ggagcaagtt ttctatgtgg gagccacttt ttttgtacag gggtaagttg |
| 2041 | ggggttttca gggagcctgt taggtgcctc cttcttttct ttcctcaatc tatgcaagcg |
| 2101 | gctctggccg ccatcatctc ctgggatgcc agagggctgc ctctccagcg gcttgggccg |
| 2161 | gggaggggac actccagttc tctagcatgg cctgaggtat ggggtatgtg catgtggagg |
| 2221 | ccagggtaag gtgaatgggg aggctgggag gactggtgtt gccctttgga gcttggtgag |
| 2281 | gagggtgggc ctagggcttg gcgagtgcca catctggcag gtttggaaat ttccaaataa |
| 2341 | atccttttgt ctattgaaaa aaaaaaaaaa aaaa |

SEQ ID NO: 89 Human SMARCD2 Amino Acid Sequence Isoform 3
(NP_001317369.1)

| | |
|---|---|
| 1 | mgrrvgvevt prwapqkcqg arpqrpgmsp gnrmpmaglq vgppagspfg aaaplrpgmp |
| 61 | ptmmdpfrkr llvpqaqppm paqrrglkrr kmadkvlpqr irelvpesqa ymdllaferk |
| 121 | ldqtiarkrm eiqeaikkpl tqkrklriyi sntfspskae gdsagtagtp ggtpagdkva |
| 181 | swelrvegkl lddpskqkrk fssffkslvi eldkelygpd nhlvewhrmp ttqetdgfqv |
| 241 | krpgdlnvkc tlllmldhqp pqykldprla rllgvhtqtr aaimqalwly ikhnqlqdgh |
| 301 | ereyincnry frqifscgrl rfseipmkla gllqhpdpiv inhvisvdpn dqkktacydi |
| 361 | dvevddplka qmsnflastt nqqeiasldv kihetiesin qlktqrdfml sfstdpqdfi |
| 421 | qewlrsqrrd lkiitdvign peeerraafy hqpwageavg rhifakvqqr rqeleqvlgi |
| 481 | rlt |

SEQ ID NO: 90 Mouse SMARCD2 cDNA Sequence Variant 1 (NM_001130187.1,
CDS: 265-1860)

| | |
|---|---|
| 1 | ctccggcgat caaacctccg gaggccggga gaggcctgcg ggctcgcggc acatcccgga |
| 61 | tctggagtat ccctggcagg agcggagtca gaggggccgc gggatcctaa agccgggctg |
| 121 | caaagaactt gcgaacttgg agtagaagat cccggaaccc ggtagtaaaa tcgggaagtc |
| 181 | ccggatcgcg gaacgtagct cgcggagcgg actcaacacg gagaccggag gccggatcgc |
| 241 | tgcaccgcgg gacgggacag agtgatgtcc ggccgtggcg cgggcgggtt cccgctgcct |
| 301 | ccgctgagcc ccggcggcgg cgccgttgcc gcggcccttg gtgcgccgcc tccgcctgcg |
| 361 | ggacccggaa tgctgcccag cccggcgctc aggggcccgg ggccttctgg aggcatgggg |
| 421 | gtaccggggg ccgccgcctt ccgccccatg ggccccgctg gccccgcggc gcagtaccag |
| 481 | cgtcctggca tgtcaccagg aagcaggatg cccatggctg gcttgcaggt gggacctcct |
| 541 | gccggttccc catttggcac agctgctccg ctccgacctg gcatgccacc taccatgatg |
| 601 | gatccattcc gaaaacgcct gcttgtgcct caggcccagc ccccgatgcc tgcccagcgc |
| 661 | cgagggttaa agaggaggaa gatggcagat aaggttctac ctcagcgaat ccgggagctt |
| 721 | gtcccagagt ctcaggcata catggatctt ttagctttcg agaggaagct ggaccagacc |
| 781 | atcgctcgca agcggatgga gattcaagag gccatcaaga agcctctgac gcaaaagcga |
| 841 | aaacttcgga tctatatttc caatacattc agccccagca aggcggatgg agataatgcg |
| 901 | ggaactgcgg ggacccctgg gggaaccccg gcagcagaca aggtggcctc ctgggagctt |
| 961 | cgagtagagg ggaaactgct ggatgatcct agcaaacaga agaggaagtt ctcatcattc |
| 1021 | tttaagagcc ttgtgattga gttggacaag gaactctatg ggccggacaa ccatctggtg |
| 1081 | gagtggcatc ggatgcccac cacacaggaa acagatggct ttcaggtgaa acggccagga |
| 1141 | gatctcaatg tcaagtgcac ccttctgctc atgctggatc atcagcctcc tcagtataaa |
| 1201 | ctggaccccc gcctggcgag gttgctggga gtgcacacac agaccagggc ggcaatcatg |
| 1261 | caggcactgt ggctttacat caaacacaac cagctgcagg acggccatga gcgcgagtac |
| 1321 | atcaactgca atcgttactt ccgccagatc ttcagttgtg gccgactccg tttctccgag |
| 1381 | attcccatga agctggctgg attgctgcag catccagacc ccattgttat taatcatgtc |
| 1441 | attagtgtgg atcctaatga ccaaaagaag acagcctgct atgacattga tgtagaggtt |
| 1501 | gatgacccac tgaaggccca gatgagcaac ttcctggcct ctaccaccaa ccagcaggag |
| 1561 | attgcttctc ttgacgtcaa gatccatgag accattgagt ccatcaacca gctaaagacc |
| 1621 | cagagggatt tcatgctcag ctttagcacc gagccccagg acttcatcca ggagtggctc |
| 1681 | cgttcccaac gccgagacct caagatcatc acagatgtga ttggaaaccc tgaggaggag |
| 1741 | agacgagctg ctttctacca ccagccctgg gctcaggaag cagtggggag gcacatcttt |
| 1801 | gccaaggtgc agcagcgaag gcaggaactg gaacaggtgc tgggaattcg cctgacctaa |
| 1861 | ctgctcaggg attgcctcct tccttcctcc cctgccctgg atggaacctg gcaagagccc |
| 1921 | gtcctctggg ttctggcttg ggctgcagac atgtaggatg gagtgaggtg tgtttcctgt |
| 1981 | caccctccac tccccagctt tagtttcata aatgtagttt tagatccctc actgcttggt |
| 2041 | tcccaaagcc ttattactga ccttttagcg ctggctttaa ttgggtttgc aatgagcggc |
| 2101 | ctcagccccc tgcaggcagg caggcctgag taggaggctg gaggctgtgc tttaactttg |
| 2161 | taccagacat ttccaaacca aaggctgctg ggtttgcatg tttacaggct ccaccctagg |
| 2221 | gccagtgcca gagctggctt tggggagctg ggcaaggaag agaaggccct agactcttcc |
| 2281 | tggcctttct aaccaaagtt ttttgccatt cctacaagcc cagtcttgct gctggtttgt |
| 2341 | ccttcttttt gggtatttgc actatttggg gagcaggttt ttctatgtgg gagccacttt |
| 2401 | tttgtacaga ggtaatgggg tttttcaggg agcccacttg gtgcctcctt cttcctttct |
| 2461 | tttcttaatc tatgcaagcg gctgcagccg ccatcatctc ctggtatgcc acaaggctgc |
| 2521 | ccacccatag ctgcttgggc agggggaggt ggaatctcct gagagtggca atgccagttc |
| 2581 | tctaacccag ttacagcagg ggtgtgtgtg cgtgcgtgcg tgcgtgctgc aggggaaggg |
| 2641 | gaaagctgga ggactgctgt taccttttgc agtcggtctt aaagaggatg ggcctaaggc |
| 2701 | ttggcaaact tggaaaattc caaataaatc tttttgttta ttggtggtgc ccagaaaaaa |
| 2761 | aaaaaaa |

SEQ ID NO: 91 Mouse SMARCD2 Amino Acid Sequence Isoform 1
(NP_001123659.1)

| | |
|---|---|
| 1 | msgrgaggfp lpplspggga vaaalgappp pagpgmlpsp alrgpgpsgg mgvpgaaafr |
| 61 | pmgpagpaaq yqrpgmspgs rmpmaglqvg ppagspfgta aplrpgmppt mmdpfrkrll |
| 121 | vpqaqppmpa qrrglkrrkm adkvlpqrir elvpesqaym dllaferkld qtiarkrmei |
| 181 | qeaikkpltq krklriyisn tfspskadgd nagtagtpgg tpaadkvasw elrvegklld |
| 241 | dpskqkrkfs sffkslviel dkelygpdnh lvewhrmptt qetdgfqvkr pgdlnvkctl |
| 301 | LLmldhqppq ykldprlarl lgvhtqtraa imqalwlyik hnqlqdgher eyincnryfr |
| 361 | qifscgrlrf seipmklagl lqhpdpivin hvisvdpndq kktacydidv evddplkaqm |
| 421 | snflasttnq qeiasldvki hetiesinql ktqrdfmlsf stepqdfiqe wlrsqrrdlk |
| 481 | iitdvignpe eerraafyhq pwaqeavgrh ifakvqqrrq eleqvlgirl t |

SEQ ID NO: 92 Mouse SMARCD2 cDNA Sequence Variant 2 (NM 031878.2, CDS:
40-1494)

| | |
|---|---|
| 1 | tttgttcctg gtctccccat ttgagagaga gagagagaga tggagggtat gggctatgga |
| 61 | cctcggaggg ctccgccact gacctgtgtc cctccactgt tccactttcc tcagcgtcct |
| 121 | ggcatgtcac caggaagcag gatgcccatg gctggcttgc aggtgggacc tcctgccggt |
| 181 | tccccatttg gcacagctgc tccgctccga cctggcatgc cacctaccat gatggatcca |
| 241 | ttccgaaaac gcctgcttgt gcctcaggcc cagcccccga tgcctgccca gcgccgaggg |
| 301 | ttaaagagga ggaagatggc agataaggtt ctacctcagc gaatccggga gcttgtccca |
| 361 | gagtctcagg catacatgga tcttttagct ttcgagagga agctggacca gaccatcgct |
| 421 | cgcaagcgga tggagattca agaggccatc aagaagcctc tgacgcaaaa gcgaaaactt |
| 481 | cggatctata tttccaatac attcagcccc agcaaggcgg atggagataa tgcgggaact |
| 541 | gcggggaccc ctgggggaac cccggcagca gacaaggtgg cctcctggga gcttcgagta |
| 601 | gaggggaaac tgctggatga tcctagcaaa cagaagagga agttctcatc attctttaag |
| 661 | agccttgtga ttgagttgga caaggaactc tatgggccgg acaaccatct ggtggagtgg |
| 721 | catcggatgc ccaccacaca ggaaacagat ggctttcagg tgaaacggcc aggagatctc |
| 781 | aatgtcaagt gcacccttct gctcatgctg gatcatcagc ctcctcagta taaactggac |
| 841 | ccccgcctgg cgaggttgct gggagtgcac acacagacca gggcggcaat catgcaggca |
| 901 | ctgtggcttt acatcaaaca caaccagctg caggacggcc atgagcgcga gtacatcaac |
| 961 | tgcaatcgtt acttccgcca gatcttcagt tgtggccgac tccgtttctc cgagattccc |
| 1021 | atgaagctgg ctggattgct gcagcatcca gaccccattg ttattaatca tgtcattagt |
| 1081 | gtggatccta atgaccaaaa gaagacagcc tgctatgaca ttgatgtaga ggttgatgac |
| 1141 | ccactgaagg cccagatgag caacttcctg gcctctacca ccaaccagca ggagattgct |
| 1201 | tctcttgacg tcaagatcca tgagaccatt gagtccatca accagctaaa gacccagagg |
| 1261 | gatttcatgc tcagctttag caccgagccc caggacttca tccaggagtg gctccgttcc |
| 1321 | caacgccgag acctcaagat catcacagat gtgattggaa accctgagga ggagagacga |
| 1381 | gctgctttct accaccagcc ctgggctcag gaagcagtgg ggaggcacat ctttgccaag |
| 1441 | gtgcagcagc gaaggcagga actggaacag gtgctgggaa ttcgcctgac ctaactgctc |
| 1501 | agggattgcc tccttccttc ctcccctgcc ctggatggaa cctggcaaga gcccgtcctc |
| 1561 | tgggttctgg cttgggctgc agacatgtag gatggagtga ggtgtgtttc ctgtcaccct |
| 1621 | ccactcccca gctttagttt cataaatgta gttttagatc cctcactgct tggttcccaa |
| 1681 | agccttatta ctgacctttt agcgctggct ttaattgggt ttgcaatgag cggcctcagc |
| 1741 | cccctgcagg caggcaggcc tgagtaggag gctggaggct gtgctttaac tttgtaccag |
| 1801 | acatttccaa accaaaggct gctgggtttg catgtttaca ggctccaccc tagggccagt |
| 1861 | gccagagctg gctttgggga gctgggcaag gaagagaagg ccctagactc ttcctggcct |
| 1921 | ttctaaccaa agttttttgc cattcctaca agcccagtct tgctgctggt ttgtccttct |
| 1981 | ttttgggtat ttgcactatt tggggagcag gtttttctat gtgggagcca cttttttgta |
| 2041 | cagaggtaat ggggtttttc agggagccca cttggtgcct ccttcttcct ttcttttctt |
| 2101 | aatctatgca agcggctgca gccgccatca tctcctggta tgccacaagg ctgcccaccc |
| 2161 | atagctgctt gggcaggggg aggtggaatc tcctgagagt ggcaatgcca gttctctaac |
| 2221 | ccagttacag caggggtgtg tgtgcgtgcg tgcgtgcgtg ctgcagggga aggggaaagc |
| 2281 | tggaggactg ctgttacctt ttgcagtcgg tcttaaagag gatgggccta aggcttggca |
| 2341 | aacttggaaa attccaaata aatctttttg tttattggtg gtgcccagaa aaaaaaaaaa |
| 2401 | a |

SEQ ID NO: 93 Mouse SMARCD2 Amino Acid Sequence Isoform 2 (NP 114084.2)

| | |
|---|---|
| 1 | megmgygprr appltcvppl fhfpqrpgms pgsrmpmagl qvgppagspf gtaaplrpgm |
| 61 | pptmmdpfrk rllvpqaqpp mpaqrrglkr rkmadkvlpq rirelvpesq aymdllafer |
| 121 | kldqtiarkr meiqeaikkp ltqkrklriy isntfspska dgdnagtagt pggtpaadkv |
| 181 | aswelrvegk llddpskqkr kfssffkslv ieldkelygp dnhlvewhrm pttqetdgfq |
| 241 | vkrpgdlnvk ctlllmldhq ppqykldprl arllgvhtqt raaimqalwl yikhnqlqdg |
| 301 | hereyincnr yfrqifscgr lrfseipmkl agllqhpdpi vinhvisvdp ndqkktacyd |
| 361 | idvevddplk aqmsnflast tnqqeiasld vkihetiesi nqlktqrdfm lsfstepqdf |
| 421 | iqewlrsqrr dlkiitdvig npeeerraaf yhqpwageav grhifakvqq rrqeleqvlg |
| 481 | irlt |

SEQ ID NO: 94 Human SMARCD3 cDNA Sequence Variant 1 (NM 001003802.1,
CDS: 130-1542)

| | |
|---|---|
| 1 | ctggcatctt cctcccctcc tcctttccag atcctcagaa tggcccttgg tgctgcaggc |
| 61 | gcggtgggct ccgggcccag gcaccgaggg ggcactggat gactctccag gtgcaggacc |
| 121 | ctgccatcta tgactccagg tcttcagcac ccacccaccg tggtacagcg ccccgggatg |
| 181 | ccgtctggag cccggatgcc ccaccagggg gcgcccatgg gccccccggg ctccccgtac |
| 241 | atgggcagcc ccgccgtgcg acccggcctg gcccccgcgg gcatggagcc cgcccgcaag |
| 301 | cgagcagcgc ccccgcccgg gcagagccag gcacagagcc agggccagcc ggtgcccacc |
| 361 | gcccccgcgc ggagccgcag tgccaagagg aggaagatgg ctgacaaaat cctccctcaa |
| 421 | aggattcggg agctggtccc cgagtcccag gcttacatgg acctcttggc atttgagagg |
| 481 | aaactggatc aaaccatcat gcggaagcgg gtggacatcc aggaggctct gaagaggccc |
| 541 | atgaagcaaa agcggaagct gcgactctat atctccaaca cttttaaccc tgcgaagcct |
| 601 | gatgctgagg attccgacgg cagcattgcc tcctgggagc tacgggtgga ggggaagctc |
| 661 | ctggatgatc ccagcaaaca gaagcggaag ttctcttctt tcttcaagag tttggtcatc |
| 721 | gagctggaca aagatcttta tggccctgac aaccacctcg ttgagtggca tcggacaccc |
| 781 | acgacccagg agacggacgg cttccaggtg aaacggcctg gggacctgag tgtgcgctgc |
| 841 | acgctgctcc tcatgctgga ctaccagcct ccccagttca aactggatcc ccgcctagcc |
| 901 | cggctgctgg ggctgcacac acagagccgc tcagccattg tccaggccct gtggcagtat |
| 961 | gtgaagacca acaggctgca ggactcccat gacaaggaat acatcaatgg ggacaagtat |
| 1021 | ttccagcaga tttttgattg tccccggctg aagttttctg agattcccca gcgcctcaca |
| 1081 | gccctgctat tgccccctga cccaattgtc atcaaccatg tcatcagcgt ggacccttca |
| 1141 | gaccagaaga agacggcgtg ctatgacatt gacgtggagg tggaggagcc attaaagggg |
| 1201 | cagatgagca gcttcctcct atccacggcc aaccagcagg agatcagtgc tctggacagt |
| 1261 | aagatccatg agacgattga gtccataaac cagctcaaga tccagaggga cttcatgcta |
| 1321 | agcttctcca gagaccccaa aggctatgtc caagacctgc tccgctccca gagccgggac |
| 1381 | ctcaaggtga tgacagatgt agccggcaac cctgaagagg agcgccgggc tgagttctac |
| 1441 | caccagccct ggtcccagga ggccgtcagt cgctacttct actgcaagat ccagcagcgc |
| 1501 | aggcaggagc tggagcagtc gctggttgtg cgcaacacct aggagcccaa aaataagcag |
| 1561 | cacgacggaa ctttcagccg tgtcccgggc cccagcattt tgccccgggc tccagcatca |
| 1621 | ctcctctgcc accttggggt gtggggctgg attaaaagtc attcatctga caaaaaaaaa |
| 1681 | aaaaaaaaa |

SEQ ID NO: 95 Human SMARCD3 Amino Acid Sequence Isoform 1
(NP_001003802.1 and NP_003069.2)

| | |
|---|---|
| 1 | mtpglqhppt vvqrpgmpsg armphqgapm gppgspymgs pavrpglapa gmeparkraa |
| 61 | pppgqsqaqs qgqpvptapa rsrsakrrkm adkilpqrir elvpesqaym dllaferkld |
| 121 | qtimrkrvdi qealkrpmkq krklrlyisn tfnpakpdae dsdgsiaswe lrvegklldd |
| 181 | pskqkrkfss ffkslvield kdlygpdnhl vewhrtpttq etdgfqvkrp gdlsvrctll |
| 241 | lmldyqppqf kldprlarll glhtqsrsai vqalwqyvkt nrlqdshdke yingdkyfqq |
| 301 | ifdcprlkfs eipqrltall lppdpivinh visvdpsdqk ktacydidve veeplkgqms |
| 361 | sfllstanqq eisaldskih etiesinqlk iqrdfmlsfs rdpkgyvqdl lrsqsrdlkv |
| 421 | mtdvagnpee erraefyhqp wsqeavsryf yckiqqrrqe leqslvvrnt |

SEQ ID NO: 96 Human SMARCD3 cDNA Sequence Variant 2 (NM_003078.3,
CDS: 169-1581)

| | |
|---|---|
| 1 | gccgggccga gccgagcgcc gagcagggag cgggcggccg cgctccgggc cggggtcccg |
| 61 | ggggagcaga tcctcagaat ggcccttggt gctgcaggcg cggtgggctc cgggcccagg |
| 121 | caccgagggg gcactggatg actctccagg tgcaggaccc tgccatctat gactccaggt |
| 181 | cttcagcacc cacccaccgt ggtacagcgc cccgggatgc cgtctggagc ccggatgccc |
| 241 | caccaggggg cgcccatggg ccccccgggc tccccgtaca tgggcagccc cgccgtgcga |
| 301 | cccggcctgg cccccgcggg catggagccc gcccgcaagc gagcagcgcc cccgcccggg |
| 361 | cagagccagg cacagagcca gggccagccg gtgcccaccg cccccgcgcg gagccgcagt |
| 421 | gccaagagga ggaagatggc tgacaaaatc ctccctcaaa ggattcggga gctggtcccc |
| 481 | gagtcccagg cttacatgga cctcttggca tttgagagga aactggatca aaccatcatg |
| 541 | cggaagcggg tggacatcca ggaggctctg aagaggccca tgaagcaaaa gcggaagctg |
| 601 | cgactctata tctccaacac ttttaaccct gcgaagcctg atgctgagga ttccgacggc |
| 661 | agcattgcct cctgggagct acgggtggag gggaagctcc tggatgatcc cagcaaacag |
| 721 | aagcggaagt tctcttcttt cttcaagagt ttggtcatcg agctggacaa agatctttat |
| 781 | ggccctgaca accacctcgt tgagtggcat cggacaccca cgacccagga gacggacggc |
| 841 | ttccaggtga aacggcctgg ggacctgagt gtgcgctgca cgctgctcct catgctggac |
| 901 | taccagcctc cccagttcaa actggatccc cgcctagccc ggctgctggg gctgcacaca |
| 961 | cagagccgct cagccattgt ccaggccctg tggcagtatg tgaagaccaa caggctgcag |
| 1021 | gactcccatg acaaggaata catcaatggg gacaagtatt tccagcagat ttttgattgt |
| 1081 | ccccggctga agttttctga gattccccag cgcctcacag ccctgctatt gccccctgac |
| 1141 | ccaattgtca tcaaccatgt catcagcgtg gacccttcag accagaagaa gacggcgtgc |
| 1201 | tatgacattg acgtggaggt ggaggagcca ttaaaggggc agatgagcag cttcctccta |
| 1261 | tccacggcca accagcagga gatcagtgct ctggacagta agatccatga gacgattgag |
| 1321 | tccataaacc agctcaagat ccagagggac ttcatgctaa gcttctccag agaccccaaa |
| 1381 | ggctatgtcc aagacctgct ccgctcccag agccgggacc tcaaggtgat gacagatgta |
| 1441 | gccggcaacc ctgaagagga gcgccgggct gagttctacc accagccctg gtcccaggag |
| 1501 | gccgtcagtc gctacttcta ctgcaagatc cagcagcgca ggcaggagct ggagcagtcg |
| 1561 | ctggttgtgc gcaacaccta ggagcccaaa aataagcagc acgacggaac tttcagccgt |
| 1621 | gtcccgggcc ccagcatttt gccccgggct ccagcatcac tcctctgcca ccttggggtg |
| 1681 | tggggctgga ttaaaagtca ttcatctgac aaaaaaaaaa aaaaaaaa |

SEQ ID NO: 97 Human SMARCD3 Amino Acid Sequence Isoform 2
(NP_001317368.1)

| | |
|---|---|
| 1 | mspgnrmpma glqvgppags pfgaaaplrp gmpptmmdpf rkrllvpqaq ppmpaqrrgl |
| 61 | krrkmadkvl pqrirelvpe sqaymdllaf erkldqtiar krmeiqeaik kpltqkrklr |
| 121 | iyisntfsps kaegdsagta gtpggtpagd kvaswelrve gkllddpskq krkfssffks |
| 181 | lvieldkely gpdnhlvewh rmpttqetdg fqvkrpgdln vkctlllmld hqppqykldp |
| 241 | rlarllgvht qtraaimqal wlyikhnqlq dghereyinc nryfrqifsc grlrfseipm |
| 301 | klagllqhpd pivinhvisv dpndqkktac ydidvevddp lkaqmsnfla sttnqqeias |
| 361 | ldvkihetie sinqlktqrd fmlsfstdpq dfiqewlrsq rrdlkiitdv ignpeeerra |
| 421 | afyhqpwaqe avgrhifakv qqrrqeleqv lgirlt |

SEQ ID NO: 98 Human SMARCD3 cDNA Sequence Variant 3 (NM_001003801.1,
CDS: 102-1553)

| | |
|---|---|
| 1 | agcaggactc agaggggaga gttggaggaa aaaaaaaggc agaaaaggga aagaaagagg |
| 61 | aagagagaga gagagtgaga ggagccgctg agcccacccc gatggccgcg gacgaagttg |
| 121 | ccggaggggc gcgcaaagcc acgaaaagca aactttttga gtttctggtc catggggtgc |
| 181 | gccccgggat gccgtctgga gcccggatgc cccaccaggg ggcgcccatg ggccccccgg |
| 241 | gctccccgta catgggcagc cccgccgtgc gacccggcct ggcccccgcg ggcatggagc |
| 301 | ccgcccgcaa gcgagcagcg cccccgcccg ggcagagcca ggcacagagc cagggccagc |
| 361 | cggtgcccac cgcccccgcg cggagccgca gtgccaagag gaggaagatg gctgacaaaa |
| 421 | tcctccctca aaggattcgg gagctggtcc ccgagtccca ggcttacatg gacctcttgg |
| 481 | catttgagag gaaactggat caaaccatca tgcggaagcg ggtggacatc caggaggctc |
| 541 | tgaagaggcc catgaagcaa aagcggaagc tgcgactcta tatctccaac acttttaacc |
| 601 | ctgcgaagcc tgatgctgag gattccgacg gcagcattgc ctcctgggag ctacgggtgg |
| 661 | aggggaagct cctggatgat cccagcaaac agaagcggaa gttctcttct ttcttcaaga |
| 721 | gtttggtcat cgagctggac aaagatcttt atggccctga caaccacctc gttgagtggc |
| 781 | atcggacacc cacgacccag gagacggacg gcttccaggt gaaacggcct ggggacctga |
| 841 | gtgtgcgctg cacgctgctc ctcatgctgg actaccagcc tccccagttc aaactggatc |
| 901 | cccgcctagc ccggctgctg gggctgcaca cacagagccg ctcagccatt gtccaggccc |
| 961 | tgtggcagta tgtgaagacc aacaggctgc aggactccca tgacaaggaa tacatcaatg |
| 1021 | gggacaagta tttccagcag atttttgatt gtccccggct gaagttttct gagattcccc |
| 1081 | agcgcctcac agccctgcta ttgccccctg acccaattgt catcaaccat gtcatcagcg |
| 1141 | tggacccttc agaccagaag aagacggcgt gctatgacat tgacgtggag gtggaggagc |
| 1201 | cattaaaggg gcagatgagc agcttcctcc tatccacggc caaccagcag gagatcagtg |
| 1261 | ctctggacag taagatccat gagacgattg agtccataaa ccagctcaag atccagaggg |
| 1321 | acttcatgct aagcttctcc agagacccca aaggctatgt ccaagacctg ctccgctccc |
| 1381 | agagccggga cctcaaggtg atgacagatg tagccggcaa ccctgaagag gagcgccggg |
| 1441 | ctgagttcta ccaccagccc tggtcccagg aggccgtcag tcgctacttc tactgcaaga |
| 1501 | tccagcagcg caggcaggag ctggagcagt cgctggttgt gcgcaacacc taggagccca |
| 1561 | aaaataagca gcacgacgga actttcagcc gtgtcccggg ccccagcatt ttgccccggg |
| 1621 | ctccagcatc actcctctgc caccttgggg tgtggggctg gattaaaagt cattcatctg |
| 1681 | acaaaaaaaa aaaaaaaaaa |

SEQ ID NO: 99 Mouse SMARCD3 cDNA Sequence (NM_025891.3, CDS: 145-
1596)

| | |
|---|---|
| 1 | gggccccctc cccactccgc tcgagtagaa gtgtgagaga gcccagcagg actcagaggg |
| 61 | gagagttgga ggaaaaaaaa ggcagaaaag ggaaagaaag aggaagagag agagagagtg |
| 121 | agaggagccg ctgagcccac cccgatggcc gcggacgaag ttgccggagg ggcgcgcaaa |
| 181 | gccacgaaaa gcaaactttt tgagtttctg gtccatgggg tgcgccccgg gatgccgtct |
| 241 | ggagcccgaa tgccccacca gggggcgccc atgggccccc cgggctcccc gtacatgggc |
| 301 | agccccgcgg tacgacccgg cctggccccc gcgggcatgg agcccgcccg caagcgagca |
| 361 | gcgcccccgc ccgggcagag ccaggcacag ggccagggcc agcccgtgcc caccgcccca |
| 421 | gcgcggagcc gcagtgccaa gaggaggaag atggctgaca aaatcctccc tcaaaggatt |
| 481 | cgggagctgg tacccgagtc ccaggcttac atggacctcc tagcatttga gaggaaactg |
| 541 | gatcaaacca tcatgcggaa gcgggtggac atccaggagg ccctgaagag gcccatgaag |
| 601 | caaaagcgaa agctgcgcct ttatatctcc aatactttta accctgcgaa gcctgatgcg |
| 661 | gaagactctg atggcagcat tgcctcctgg gagctgcggg tggaggggaa gctcttggat |
| 721 | gatcctagta agcagaagag gaagttttct tccttcttca agagtttggt cattgagttg |
| 781 | gacaaagacc tttatggccc agacaaccac cttgttgagt ggcaccggac acccacaacc |
| 841 | caggaaacag atgggttcca agtgaagaga ccaggggact tgagtgtgcg ctgcaccctg |
| 901 | ctcctgatgc tggactatca gcctccccag ttcaaattgg acccccgctt agcccggctg |
| 961 | ctggggttac acacacagag ccgctcagcc attgtccagg cactgtggca gtatgtgaag |
| 1021 | accaacaggc tacaggactc ccatgacaag gagtacatca atggcgacaa gtatttccag |
| 1081 | cagatttttg actgcccccg cctaaagttc tctgagattc cccagcgcct cacagccctg |
| 1141 | ctgctgcccc ctgaccccat tgtgatcaac cacgtcatca gcgtggaccc atcagaccag |
| 1201 | aagaagacag cgtgctatga catagatgtg gaggtggagg aaccgctgaa agggcagatg |
| 1261 | agtagcttcc tcctgtccac ggccaaccag caggagatca gtgctctgga cagtaagatc |
| 1321 | catgagacga ttgagtccat aaaccagctc aagatccaga gggacttcat gctaagtttc |
| 1381 | tccagagacc ccaaaggcta cgtccaagac ctgctccgct cccagagccg tgatctcaag |
| 1441 | gtgatgacag atgtggcagg gaaccccgag gaagaacgca gggctgagtt ctaccaccag |
| 1501 | ccctggtccc aggaagccgt tagccgctac ttctactgta agatccagca gcgcaggcag |
| 1561 | gagctggagc agtcgctggt cgtgcgcaac acctaggagc ccgtgaacaa gcgtcagggt |
| 1621 | ggaccagcca ctccgcccag cacaggccct gggctctgga ctccccctct cgcgctgtgc |
| 1681 | ggaaggtggg gagggctgga tggattaaag gtcacgtaac agacaaaaaa aaaaaaaaaa |
| 1741 | aaa |

SEQ ID NO: 100 Mouse SMARCD3 Amino Acid Sequence (NP_080167.3)

| | |
|---|---|
| 1 | maadevagga rkatksklfe flvhgvrpgm psgarmphqg apmgppgspy mgspavrpgl |
| 61 | apagmepark raapppgqsq aqgqgqpvpt aparsrsakr rkmadkilpq rirelvpesq |
| 121 | aymdllafer kldqtimrkr vdiqealkrp mkqkrklrly isntfnpakp daedsdgsia |
| 181 | swelrvegkl lddpskqkrk fssffkslvi eldkdlygpd nhlvewhrtp ttqetdgfqv |
| 241 | krpgdlsvrc tlllmldyqp pqfkldprla rllglhtqsr saivqalwqy vktnrlqdsh |
| 301 | dkeyingdky fqqifdcprl kfseipqrlt alllppdpiv inhvisvdps dqkktacydi |
| 361 | dveveeplkg qmssfllsta nqqeisalds kihetiesin qlkiqrdfml sfsrdpkgyv |
| 421 | qdllrsqsrd lkvmtdvagn peeerraefy hqpwsqeavs ryfyckiqqr rqeleqslvv |
| 481 | rnt |

SEQ ID NO: 101 human SMARCE1 cDNA Sequence (NM_003079.4, CDS: 125-
1360)

| | |
|---|---|
| 1 | gctccggacg cgaggggcgg ggcgagcgcg ggacaaaggg aagcgaagcc ggagctgcgg |
| 61 | gcgctttttc tgcccgcggt gtctcagatt cattcttaag gaactgagaa cttaatcttc |
| 121 | caaaatgtca aaaagaccat cttatgcccc acctcccacc ccagctcctg caacacaaat |
| 181 | gcccagcaca ccagggtttg tgggatacaa tccatacagt catctcgcct acaacaacta |
| 241 | caggctggga gggaacccgg gcaccaacag ccgggtcacg gcatcctctg gtatcacgat |
| 301 | tccaaaaccc ccaaagccac cagataagcc gctgatgccc tacatgaggt acagcagaaa |
| 361 | ggtctgggac caagtaaagg cttccaaccc tgacctaaag ttgtgggaga ttggcaagat |
| 421 | tattggtggc atgtggcgag atctcactga tgaagaaaaa caagaatatt taaacgaata |
| 481 | cgaagcagaa aagatagagt acaatgaatc tatgaaggcc tatcataatt cccccgcgta |
| 541 | ccttgcttac ataaatgcaa aaagtcgtgc agaagctgct ttagaggaag aaagtcgaca |
| 601 | gagacaatct cgcatggaga aaggagaacc gtacatgagc attcagcctg ctgaagatcc |
| 661 | agatgattat gatgatggct tttcaatgaa gcatacagcc accgcccgtt tccagagaaa |
| 721 | ccaccgcctc atcagtgaaa ttcttagtga gagtgtggtg ccagacgttc ggtcagttgt |
| 781 | cacaacagct agaatgcagg tcctcaaacg gcaggtccag tccttaatgg ttcatcagcg |
| 841 | aaaactagaa gctgaacttc ttcaaataga ggaacgacac caggagaaga agaggaaatt |
| 901 | cctggaaagc acagattcat ttaacaatga acttaaaagg ttgtgcggtc tgaaagtaga |
| 961 | agtggatatg gagaaaattg cagctgagat tgcacaggca gaggaacagg cccgcaaaag |
| 1021 | gcaggaggaa agggagaagg aggccgcaga gcaagctgag cgcagtcaga gcagcatcgt |
| 1081 | tcctgaggaa gaacaagcag ctaacaaagg cgaggagaag aaagacgacg agaacattcc |
| 1141 | gatggagaca gaggagacac accttgaaga aacaacagag agccaacaga atggtgaaga |
| 1201 | aggcacgtct actcctgagg acaaggagag tgggcaggag ggggtcgaca gtatggcaga |
| 1261 | ggaaggaacc agtgatagta acactggctc ggagagcaac agtgcaacag tggaggagcc |
| 1321 | accaacagat cccataccag aagatgagaa aaaagaataa gtgttgcctt gttttgtgtg |
| 1381 | ttctaaatac tttttttaat gaaaaaatgt tttttggttt taatggtgtt acgtggtttg |
| 1441 | tgtattaatt ttttttcttg tccatatcac accaccaaag gcttttggac catttagcat |
| 1501 | catgagccta atggctcagt cagtcacctt tcttaagtgt tgtgaagatg gctcttttct |
| 1561 | ttggatcttg tttctagccc tcaactgctg aaagcctcag aatttagatt aattgagaaa |
| 1621 | acacccacct cttttagaga attatccttt gatgctgcag aatctactct tacaatgcct |
| 1681 | tcctacagct cactggggtg cttaccaaag ccatagcttt aaaccttccc agtccccatc |
| 1741 | agtagcttcc tgaaagtctc ctctcttgtt tacttctgca aagggtagct tcttaaaaac |
| 1801 | gtgatcatgt atgagtatgt atttgttcac ttaccctttt ttacttttaa tcaatgtcag |
| 1861 | ataccaagag ttgtgttaag ctgagtgtag tgtgtaacta actacacttg gatcttactg |
| 1921 | atccagaaat agtccccata gttagagtag ttacttatga agtggttatt aaagtgaaca |
| 1981 | cagcacatat acattatcta tactgctttt tgttatgatt aatactgggt atgttctggt |
| 2041 | aaatccatcc ttattgtata gaaaaaaaat tactttttta ccaggttttc caaagacaga |
| 2101 | atagatcaca aagctcaagg aatttaatat tcttgtaatg gactagataa ttcaaactga |
| 2161 | ttagcccatt ccagaagaaa aacagctggg aattaagtta atccacttga aattgtttta |
| 2221 | caataatcag aacatccaaa cctcaaggct caggatccca tagaccagag cccacctttt |
| 2281 | tgataaactt agtaaagtct tggagactag aagcaagata gtttgtgaca cataagcttc |
| 2341 | ccaaaaacta gaatagattt ttactgaata gtggtatatc tgatggtata tgtttcttaa |
| 2401 | aggtccaaat gtaataaaaa aaaaa |

SEQ ID NO: 102 human SMARCE1 Amino Acid Sequence (NP_003070.3)

| | |
|---|---|
| 1 | mskrpsyapp ptpapatqmp stpgfvgynp yshlaynnyr lggnpgtnsr vtassgitip |
| 61 | kppkppdkpl mpymrysrkv wdqvkasnpd lklweigkii ggmwrdltde ekqeylneye |
| 121 | aekieynesm kayhnspayl ayinaksrae aaleeesrqr qsrmekgepy msiqpaedpd |
| 181 | dyddgfsmkh tatarfqrnh rliseilses vvpdvrsvvt tarmqvlkrq vqslmvhqrk |
| 241 | leaellqiee rhqekkrkfl estdsfnnel krlcglkvev dmekiaaeia qaeeqarkrq |
| 301 | eerekeaaeq aersqssivp eeeqaankge ekkddenipm eteethleet tesqqngeeg |
| 361 | tstpedkesg qegvdsmaee gtsdsntgse snsatveepp tdpipedekk e |

SEQ ID NO: 103 Mouse SMARCE1 cDNA Sequence (NM_020618.4, CDS: 662-
1897)

| | |
|---|---|
| 1 | ggcggaggca ggggagcccc gctgggcgcc agcaaggacc taaacgcagc gacccgggtc |
| 61 | ctccccgcct acattctcca tcttctccat tcatacgtcc atcagcggag gactgaagac |
| 121 | cagagcgaag ggaaaagcca gagtgcatgg tgtgtgggaa ctgcgtccca ccctctcccg |
| 181 | ggagaggctc cggcgagcct ttcccctccg gcgcccgcct cacgcggcgg cgcccaccgc |
| 241 | ctcagtgaag ccccgggcgc gcagtctgcg cagttcctgc cgccgggccg cgaaccaggg |
| 301 | cccgcaacgc ggcccagcct tctccgccct cctcgccgtg acgaatcggc gcccgactgg |
| 361 | gacgggatcc aaattggaag acttctgagg aaacccagga gcctgacgaa atttttttta |
| 421 | aaaatccttg gcgccctaag cctcgccgcg tgctcactgg aagggctgtt cgtctgccgg |
| 481 | gagccggccg cggccggcag acaattcccg ggagcgtgtg gaaagtgcga gcgcggaagc |
| 541 | tccggcgcga ggggCggggc gagcgcggga caaagggaag cgaagccgga gctgcgggcg |
| 601 | cctgctcggc ccgcggtgtc tcagattcat tcttaaggaa ctgagaactt aatcttccaa |
| 661 | aatgtcaaaa agaccatctt atgccccacc tcccacccca gctcctgcaa cacaaatgcc |
| 721 | cagcacacca gggtttgtgg gatacaatcc atacagtcat ctcgcctaca acaactacag |
| 781 | gctgggaggg aacccgggca ccaacagccg ggtcacggcg tcctctggca ttacgattcc |
| 841 | aaagcctcca aagccaccag ataagccgct gatgccctac atgaggtaca gcagaaaggt |
| 901 | ctgggaccaa gtaaaggctt ccaaccctga cctaaagttg tgggagattg gcaagattat |
| 961 | tggtggcatg tggcgagatc tcactgatga agagaagcaa gaatatttaa acgaatacga |
| 1021 | agcagaaaag atagagtaca atgagtctat gaaggcctac cataattccc ctgcgtacct |
| 1081 | tgcctatatt aatgcaaaaa gtcgtgcgga agctgcatta gaggaagaaa gtcgacagag |
| 1141 | acagtctcgc atggagaaag gagaacctta catgagcatt cagcctgctg aggatccaga |
| 1201 | cgactatgat gatggctttt caatgaagca cacagccact gcccgtttcc agagaaacca |
| 1261 | ccgtctcatc agtgagatcc tcagtgagag tgtggtacct gatgtgcggt cggttgtcac |
| 1321 | aacagctaga atgcaggtcc tcaagcgaca ggtccagtct ttaatggttc atcagcggaa |
| 1381 | actagaagcc gagctccttc agatagagga acgacaccag gaaaagaaga ggaaattcct |
| 1441 | ggaaagcacg gactccttta acaatgaact taaaaggtta tgtggtctga aggtggaagt |
| 1501 | agacatggag aagattgcgg ctgagatcgc acaggcggag gaacaagccc gcaagaggca |
| 1561 | agaggagagg gagaaggagg cagcagagca ggctgagcgc agtcagagca gcatggcccc |
| 1621 | tgaggaagag caagtggcga acaaagccga ggagaagaaa gatgaggaga gcatcccgat |
| 1681 | ggagacagag gagacacacc ttgaagacac agcagagagc cagcagaatg gtgaagaagg |
| 1741 | cacgtctact cctgaggaca aggagagtgg gcaggagggg gttgacagca tggaggtgga |
| 1801 | agggaccagt gacagtaaca cgggctcaga gagcaacagc gccacagtgg aggagccgcc |
| 1861 | cacagaccca gtgccagaag acgagaagaa ggagtaaatg ttgccttgtt ttatgtgacc |
| 1921 | taaaactttt ttaaatgaaa aaaaaatgtg gttttttttt tggttttaat ggtgttatgt |
| 1981 | ggtctgtgta ttaattattt acttttccgt tgatacaaca tgaaggtctt tgaaccctca |
| 2041 | gcatcatagc ctaatgccag ccgctcacct ttcttagctc tcaacgtctg aaacctcaga |
| 2101 | gctgagatta atcaagacac ccatcattct ctgagaacta ccttggctgc tgcagaatcg |
| 2161 | actcttccaa atacctgcct tcagctcacg tggtgctcac caaagccata gctttaaacc |
| 2221 | cttccagccc atccacagct ttcccagtcc ctgtcttgtg tacttacaca gagtgccctc |
| 2281 | ttgaaatcat gagggggtct cttcactcac cctttctatg tcccatgtca gacaccagga |
| 2341 | gttctcttac agggtagggt gtagccagaa actggtgaga cacagatcac agagatgcct |
| 2401 | ctgggggcac tgggggtggg ggagcagggg gagtacagtt gttctttctg tggattcctt |
| 2461 | gttggtgaga gctgcgcctg cttatctaga gtgctgttca gtgtagtcga tctgggatgt |
| 2521 | gttctgggaa attcatcctt tttgtacagg ggaaagaaac actttttttt accagattgg |
| 2581 | ctttccaaag acacgataga tggcagagct taaggaatgg aatgttctta taatggacta |
| 2641 | cagacttcaa agtgattggc ccattccaaa aggaaaatgg gaatgctgtt catccatgtg |
| 2701 | agcatacttc acagtgatga aaacctcaag actcgagatc ccatagatca gagccgaacc |
| 2761 | tacttttttg ataacccctg tagtggtctt agagactaga aacaagatag tttgtagtgt |
| 2821 | gtgctcccta aaatctagaa tagattttta ctgaatagtg gtatatatga tggtatatgt |
| 2881 | ttcttaaagg tccaaacata ataaagaaat taagacaaaa aaaaaaaaaa aaaaaaaaaa |
| 2941 | aaaaaaaaaa aaaaaaaaaa a |

SEQ ID NO: 104 Mouse SMARCE1 Amino Acid Sequence (NP_065643.1)

| | |
|---|---|
| 1 | mskrpsyapp ptpapatqmp stpgfvgynp yshlaynnyr lggnpgtnsr vtassgitip |
| 61 | kppkppdkpl mpymrysrkv wdqvkasnpd lklweigkii ggmwrdltde ekqeylneye |
| 121 | aekieynesm kayhnspayl ayinaksrae aaleeesrqr qsrmekgepy msiqpaedpd |
| 181 | dyddgfsmkh tatarfqrnh rliseilses vvpdvrsvvt tarmqvlkrq vqslmvhqrk |
| 241 | leaellqiee rhqekkrkfl estdsfnnel krlcglkvev dmekiaaeia qaeeqarkrq |
| 301 | eerekeaaeq aersqssmap eeeqvankae ekkdeesipm eteethledt aesqqngeeg |
| 361 | tstpedkesg qegvdsmeve gtsdsntgse snsatveepp tdpvpedekk e |

SEQ ID NO: 105 Human DPF1 cDNA Sequence Variant 1 (NM_001135155.2, CDS:
28-1272)

| | |
|---|---|
| 1 | gtgctcccgc cccccgggaa tgaatggatg ggcggcctca gcgcccgccc gaccgctggg |
| 61 | aggaccgacc cggcggggac ctgctggggg caggacccgg ggagcaagat ggccactgtc |
| 121 | atccctggcc ccctgagcct aggcgaggac ttctaccgcg aggccatcga gcactgccgc |
| 181 | agttacaacg cgcgcctgtg cgccgagcgc agcctgcgac tgcccttcct cgactcgcag |
| 241 | accggcgtgg cccagaacaa ctgctacatc tggatggaga agacccaccg cgggccgggt |
| 301 | ttggccccgg gacagattta cacgtacccc gcccgctgtt ggaggaagaa acggagactc |
| 361 | aacatcctgg aggaccccag actcaggccc tgcgagtaca agatcgactg tgaagcaccc |
| 421 | ctgaagaagg agggtggcct cccggaaggg ccggtcctcg aggctctact gtgtgcagag |
| 481 | acgggggaga agaagattga gctgaaggag gaggagacca ttatggactg tcagaaacag |
| 541 | cagttgctgg agtttccgca tgacctcgag gtggaagact tggaggatga cattcccagg |
| 601 | aggaagaaca gggccaaagg aaaggcatat ggcatcgggg gtctccggaa acgccaggac |
| 661 | accgcttccc tggaggaccg agacaagccg tatgtctgtg atatctgtgg gaaacggtat |
| 721 | aagaaccggc cggggctcag ctaccactac acccacaccc acctggccga ggaggagggg |
| 781 | gaggagaacg ccgaacgcca cgccctgccc ttccaccgga aaaacaacca taaacagttt |
| 841 | tacaaagaat tggcctgggt ccctgaggca caaaggaaac acacagccaa gaaggcgccc |
| 901 | gacggcactg tcatccccaa cggctactgt gacttctgcc tggggggctc caagaagacg |
| 961 | gggtgtcccg aggacctcat ctcctgtgcg gactgtgggc gatcaggaca cccctcgtgt |
| 1021 | ttacaattca cggtgaacat gacggcagcc gtgcggacct accgctggca gtgcatcgag |
| 1081 | tgcaaatcct gcagcctgtg cggaacctcc gagaacgacg accagctgct gttttgtgat |
| 1141 | gactgcgatc ggggttacca catgtactgc ctgagtcccc ccatggcgga gcccccggaa |
| 1201 | gggagctgga gctgtcacct ctgtctccgg cacctgaagg aaaaggcttc tgcttacatc |
| 1261 | accctcacct aggccggctc ggctcgccgc gactctgggg tggtgctcgc ctacctgcct |
| 1321 | ctccgagctc ctcaattctc ccccaccctg aacatcccgc agggggaggg ggagaggggg |
| 1381 | aagccgagag ggggctgggc caccccctcc cctctgtgca agtggaatgt ctgccctgtg |
| 1441 | ggtgggtggg cccggccagg gcctctccct ccctccctcc ctctctgtcc cttggcaaat |
| 1501 | ggacaccagg ggcttctccc ctcaaagcca taccccgcct ctgggcgggc atggggggtg |
| 1561 | gtgggtgcca gccaggggca tggacagagc ctttttctaa agaaaaagac aaaaagttaa |
| 1621 | aaaaaaaaaa aagaagaaaa gaaaagaagt taatatatac aaagagtcct ccaaggcctg |
| 1681 | gctgggtgga ggggcgctgc tgagagtgtc caccgggcac ccgcctctgc cggccccccg |
| 1741 | ccgggcgccc caaccccaat ttctggagct gcagccgtcc cgcgccccac ccaaggtggg |
| 1801 | cgccttcccc tcttgtgccc agggcggtgg gcgtggtgtc cacccgcccc tcctggtgcc |
| 1861 | cacggtggat actgcatgat gtgaaccttg gttttgaact ctgttcctgc ccctccccga |
| 1921 | ccgccccagc ctgtgcccgc cccgtgcctg ccgtggctgg tgggtggcgg tggtggggcc |
| 1981 | gggtgggccc ccgcccagcg cctgctggaa tgagaagcac agactccgcc acggactcct |
| 2041 | tttctctccc tcctcccgcc ccgccaggcc tggcggcccc cgcccccctc gctggccatt |
| 2101 | ttgggggagt gagggggcgt ggttgtttct tgtggttgtg tgtgtttgtt gttcgggttt |
| 2161 | taaaaaaggg aaactgagac tgcaggtggg ggaggtggtg ggttttgggg ggatgtcccc |
| 2221 | taatccagga gtgccccctc acttgtcacc gagtctcctc tattgcctgc ctctgctgtg |
| 2281 | aattaacttg ttctgtgtat taaactgggc ctgacccctc tgcccacgaa aaaaaaaaaa |
| 2341 | aaaaaaaa |

SEQ ID NO: 106 Human DPF1 Amino Acid Sequence Isoform A (NP_001128627.1)

| | |
|---|---|
| 1 | mgglsarpta grtdpagtcw gqdpgskmat vipgplslge dfyreaiehc rsynarlcae |
| 61 | rslrlpflds qtgvaqnncy iwmekthrgp glapgqiyty parcwrkkrr lniledprlr |
| 121 | pceykidcea plkkegglpe gpvleallca etgekkielk eeetimdcqk qqllefphdl |
| 181 | evedleddip rrknrakgka ygigglrkrq dtasledrdk pyvcdicgkr yknrpglsyh |
| 241 | yththlaeee geenaerhal pfhrknnhkq fykelawvpe aqrkhtakka pdgtvipngy |
| 301 | cdfclggskk tgcpedlisc adcgrsghps clqftvnmta avrtyrwqci eckscslcgt |
| 361 | senddqllfc ddcdrgyhmy clsppmaepp egswschlcl rhlkekasay itlt |

SEQ ID NO: 107 Human DPF1 cDNA Sequence Variant 2 (NM_004647.3, CDS: 28-
1170)

| | |
|---|---|
| 1 | gtgctcccgc cccccgggaa tgaatggatg ggcggcctca gcgcccgccc gaccgctggg |
| 61 | aggaccgacc cggcggggac ctgctggggg caggacccgg ggagcaagat ggccactgtc |
| 121 | atccctggcc ccctgagcct aggcgaggac ttctaccgcg aggccatcga gcactgccgc |
| 181 | agttacaacg cgcgcctgtg cgccgagcgc agcctgcgac tgcccttcct cgactcgcag |
| 241 | accggcgtgg cccagaacaa ctgctacatc tggatggaga agacccaccg cgggccgggt |
| 301 | ttggccccgg gacagattta cacgtacccc gcccgctgtt ggaggaagaa acggagactc |
| 361 | aacatcctgg aggaccccag actcaggccc tgcgagtaca agatcgactg tgaagcaccc |
| 421 | ctgaagaagg agggtggcct cccggaaggg ccggtcctcg aggctctact gtgtgcagag |
| 481 | acgggggaga agaagattga gctgaaggag gaggagacca ttatggactg tcagaaacag |
| 541 | cagttgctgg agtttccgca tgacctcgag gtggaagact tggaggatga cattcccagg |
| 601 | aggaagaaca gggccaaagg aaaggcatat ggcatcgggg gtctccggaa acgccaggac |
| 661 | accgcttccc tggaggaccg agacaagccg tatgtctgtg ataagtttta caaagaattg |
| 721 | gcctgggtcc ctgaggcaca aaggaaacac acagccaaga aggcgcccga cggcactgtc |
| 781 | atccccaacg gctactgtga cttctgcctg gggggctcca agaagacggg gtgtcccgag |
| 841 | gacctcatct cctgtgcgga ctgtgggcga tcaggacacc cctcgtgttt acaattcacg |
| 901 | gtgaacatga cggcagccgt gcggacctac cgctggcagt gcatcgagtg caaatcctgc |
| 961 | agcctgtgcg gaacctccga gaacgacggt gccagctggg cgggtctcac cccccaggac |
| 1021 | cagctgctgt tttgtgatga ctgcgatcgg ggttaccaca tgtactgcct gagtcccccc |
| 1081 | atggcggagc ccccggaagg gagctggagc tgtcacctct gtctccggca cctgaaggaa |
| 1141 | aaggcttctg cttacatcac cctcacctag gccggctcgg ctcgccgcga ctctggggtg |
| 1201 | gtgctcgcct acctgcctct ccgagctcct caattctccc ccaccctgaa catcccgcag |
| 1261 | ggggaggggg agagggggaa gccgagaggg ggctgggcca ccccctcccc tctgtgcaag |
| 1321 | tggaatgtct gccctgtggg tgggtgggcc cggccagggc ctctccctcc ctccctccct |
| 1381 | ctctgtccct tggcaaatgg acaccagggg cttctcccct caaagccata ccccgcctct |
| 1441 | gggcgggcat ggggggtggt gggtgccagc caggggcatg gacagagcct ttttctaaag |
| 1501 | aaaaagacaa aaagttaaaa aaaaaaaaaa gaagaaaaga aaagaagtta atatatacaa |
| 1561 | agagtcctcc aaggcctggc tgggtggagg ggcgctgctg agagtgtcca ccgggcaccc |
| 1621 | gcctctgccg gccccccgcc gggcgcccca accccaattt ctggagctgc agccgtcccg |
| 1681 | cgccccaccc aaggtgggcg ccttcccctc ttgtgcccag ggcggtgggc gtggtgtcca |
| 1741 | cccgcccctc ctggtgccca cggtggatac tgcatgatgt gaaccttggt tttgaactct |
| 1801 | gttcctgccc ctccccgacc gccccagcct gtgcccgccc cgtgcctgcc gtggctggtg |
| 1861 | ggtggcggtg gtggggccgg gtgggccccc gcccagcgcc tgctggaatg agaagcacag |
| 1921 | actccgccac ggactccttt tctctccctc ctcccgcccc gccaggcctg gcggcccccg |
| 1981 | cccccctcgc tggccatttt gggggagtga gggggcgtgg ttgtttcttg tggttgtgtg |
| 2041 | tgtttgttgt tcgggtttta aaaaagggaa actgagactg caggtggggg aggtggtggg |
| 2101 | ttttgggggg atgtccccta atccaggagt gccccctcac ttgtcaccga gtctcctcta |
| 2161 | ttgcctgcct ctgctgtgaa ttaacttgtt ctgtgtatta aactgggcct gacccctctg |
| 2221 | cccacgaaaa aaaaaaaaaa aaaaaa |

SEQ ID NO: 108 Human DPF1 Amino Acid Sequence Isoform B (NP_004638.2)

| | |
|---|---|
| 1 | mgglsarpta grtdpagtcw gqdpgskmat vipgplslge dfyreaiehc rsynarlcae |
| 61 | rslrlpflds qtgvaqnncy iwmekthrgp glapgqiyty parcwrkkrr lniledprlr |
| 121 | pceykidcea plkkegglpe gpvleallca etgekkielk eeetimdcqk qqllefphdl |
| 181 | evedleddip rrknrakgka ygigglrkrq dtasledrdk pyvcdkfyke lawvpeaqrk |
| 241 | htakkapdgt vipngycdfc lggskktgcp edliscadcg rsghpsclqf tvnmtaavrt |
| 301 | yrwqciecks cslcgtsend gaswagltpq dqllfcddcd rgyhmyclsp pmaeppegsw |
| 361 | schlclrhlk ekasayitlt |

SEQ ID NO: 109 Human DPF1 cDNA Sequence Variant 3 (NM_001135156.2, CDS:
288-1286)

| | |
|---|---|
| 1 | cgcagcccca agaatgaatg aaatcgtagc gcgctgggcg gcagagcggg cggcgcaggc |
| 61 | cgggctgggc ccgcgcgcgg cggcagcggc gccccgggcc ggaggcggcc cagccgagcg |
| 121 | ggccatggcc accgccattc agaacccgct caagtcgcga ggacttctac cgcgaggcca |
| 181 | tcgagcactg ccgcagttac aacgcgcgcc tgtgcgccga gcgcagcctg cgactgccct |
| 241 | tcctcgactc gcagaccggc gtggcccaga acaactgcta catctggatg gagaagaccc |
| 301 | accgcgggcc gggtttggcc ccgggacaga tttacacgta ccccgcccgc tgttggagga |
| 361 | agaaacggag actcaacatc ctggaggacc ccagactcag gccctgcgag tacaagatcg |
| 421 | actgtgaagc acccctgaag aaggagggtg gcctcccgga agggccggtc ctcgaggctc |
| 481 | tactgtgtgc agagacgggg gagaagaaga ttgagctgaa ggaggaggag accattatgg |
| 541 | actgtcagaa acagcagttg ctggagtttc cgcatgacct cgaggtggaa gacttggagg |
| 601 | atgacattcc caggaggaag aacagggcca aaggaaaggc atatggcatc gggggtctcc |
| 661 | ggaaacgcca ggacaccgct tccctggagg accgagacaa gccgtatgtc tgtgatatct |
| 721 | gtgggaaacg gtataagaac cggccggggc tcagctacca ctacacccac acccacctgg |
| 781 | ccgaggagga gggggaggag aacgccgaac gccacgccct gcccttccac cggaaaaaca |
| 841 | accataaaca gttttacaaa gaattggcct gggtccctga ggcacaaagg aaacacacag |
| 901 | ccaagaaggc gcccgacggc actgtcatcc ccaacggcta ctgtgacttc tgcctggggg |
| 961 | gctccaagaa gacggggtgt cccgaggacc tcatctcctg tgcggactgt gggcgatcag |
| 1021 | gacacccctc gtgtttacaa ttcacggtga acatgacggc agccgtgcgg acctaccgct |
| 1081 | ggcagtgcat cgagtgcaaa tcctgcagcc tgtgcggaac ctccgagaac gacgaccagc |
| 1141 | tgctgttttg tgatgactgc gatcggggtt accacatgta ctgcctgagt ccccccatgg |
| 1201 | cggagccccc ggaagggagc tggagctgtc acctctgtct ccggcacctg aaggaaaagg |
| 1261 | cttctgctta catcaccctc acctaggccg gctcggctcg ccgcgactct ggggtggtgc |
| 1321 | tcgcctacct gcctctccga gctcctcaat tctcccccac cctgaacatc ccgcaggggg |
| 1381 | agggggagag ggggaagccg agagggggct gggccacccc ctcccctctg tgcaagtgga |
| 1441 | atgtctgccc tgtgggtggg tgggcccggc cagggcctct ccctccctcc ctccctctct |
| 1501 | gtcccttggc aaatggacac caggggcttc tcccctcaaa gccatacccc gcctctgggc |
| 1561 | gggcatgggg ggtggtgggt gccagccagg ggcatggaca gagccttttt ctaaagaaaa |
| 1621 | agacaaaaag ttaaaaaaaa aaaaaagaag aaaagaaaag aagttaatat atacaaagag |
| 1681 | tcctccaagg cctggctggg tggaggggcg ctgctgagag tgtccaccgg gcacccgcct |
| 1741 | ctgccggccc cccgccgggc gccccaaccc caatttctgg agctgcagcc gtcccgcgcc |
| 1801 | ccacccaagg tgggcgcctt cccctcttgt gcccagggcg gtgggcgtgg tgtccacccg |
| 1861 | cccctcctgg tgcccacggt ggatactgca tgatgtgaac cttggttttg aactctgttc |
| 1921 | ctgcccctcc ccgaccgccc cagcctgtgc ccgccccgtg cctgccgtgg ctggtgggtg |
| 1981 | gcggtggtgg ggccgggtgg gcccccgccc agcgcctgct ggaatgagaa gcacagactc |
| 2041 | cgccacggac tccttttctc tccctcctcc cgccccgcca ggcctggcgg cccccgcccc |
| 2101 | cctcgctggc cattttgggg gagtgagggg gcgtggttgt ttcttgtggt tgtgtgtgtt |
| 2161 | tgttgttcgg gttttaaaaa agggaaactg agactgcagg tgggggaggt ggtgggtttt |
| 2221 | ggggggatgt cccctaatcc aggagtgccc cctcacttgt caccgagtct cctctattgc |
| 2281 | ctgcctctgc tgtgaattaa cttgttctgt gtattaaact gggcctgacc cctctgccca |
| 2341 | cgaaaaaaaa aaaaaaaaaa aa |

SEQ ID NO: 110 Human DPF1 Amino Acid Sequence Isoform C (NP_001128628.1)

| | |
|---|---|
| 1 | mekthrgpgl apgqiytypa rcwrkkrrln iledprlrpc eykidceapl kkegglpegp |
| 61 | vleallcaet gekkielkee etimdcqkqq llefphdlev edleddiprr knrakgkayg |
| 121 | igglrkrqdt asledrdkpy vcdicgkryk nrpglsyhyt hthlaeeege enaerhalpf |
| 181 | hrknnhkqfy kelawvpeaq rkhtakkapd gtvipngycd fclggskktg cpedliscad |
| 241 | cgrsghpscl qftvnmtaav rtyrwqciec kscslcgtse nddqllfcdd cdrgyhmycl |
| 301 | sppmaeppeg swschlclrh lkekasayit lt |

SEQ ID NO: 111 Human DPF1 cDNA Sequence Variant 4 (NM_001289978.1, CDS:
28-1302)

| | |
|---|---|
| 1 | gtgctcccgc cccccgggaa tgaatggatg ggcggcctca gcgcccgccc gaccgctggg |
| 61 | aggaccgacc cggcggggac ctgctggggg caggacccgg ggagcaagat ggccactgtc |
| 121 | atccctggcc ccctgagcct aggcgaggac ttctaccgcg aggccatcga gcactgccgc |
| 181 | agttacaacg cgcgcctgtg cgccgagcgc agcctgcgac tgcccttcct cgactcgcag |
| 241 | accggcgtgg cccagaacaa ctgctacatc tggatggaga agacccaccg cgggccgggt |
| 301 | ttggccccgg gacagattta cacgtacccc gcccgctgtt ggaggaagaa acggagactc |
| 361 | aacatcctgg aggaccccag actcaggccc tgcgagtaca agatcgactg tgaagcaccc |
| 421 | ctgaagaagg agggtggcct cccggaaggg ccggtcctcg aggctctact gtgtgcagag |
| 481 | acgggggaga agaagattga gctgaaggag gaggagacca ttatggactg tcagaaacag |
| 541 | cagttgctgg agtttccgca tgacctcgag gtggaagact tggaggatga cattcccagg |
| 601 | aggaagaaca gggccaaagg aaaggcatat ggcatcgggg gtctccggaa acgccaggac |
| 661 | accgcttccc tggaggaccg agacaagccg tatgtctgtg atatctgtgg gaaacggtat |
| 721 | aagaaccggc cggggctcag ctaccactac acccacaccc acctggccga ggaggagggg |
| 781 | gaggagaacg ccgaacgcca cgccctgccc ttccaccgga aaaacaacca taaacagttt |
| 841 | tacaaagaat tggcctgggt ccctgaggca caaaggaaac acacagccaa gaaggcgccc |
| 901 | gacggcactg tcatccccaa cggctactgt gacttctgcc tggggggctc caagaagacg |
| 961 | gggtgtcccg aggacctcat ctcctgtgcg gactgtgggc gatcaggaca cccctcgtgt |
| 1021 | ttacaattca cggtgaacat gacggcagcc gtgcggacct accgctggca gtgcatcgag |
| 1081 | tgcaaatcct gcagcctgtg cggaacctcc gagaacgacg gtgccagctg ggcgggtctc |
| 1141 | accccccagg accagctgct gttttgtgat gactgcgatc ggggttacca catgtactgc |
| 1201 | ctgagtcccc ccatggcgga gcccccggaa gggagctgga gctgtcacct ctgtctccgg |
| 1261 | cacctgaagg aaaaggcttc tgcttacatc accctcacct aggccggctc ggctcgccgc |
| 1321 | gactctgggg tggtgctcgc ctacctgcct ctccgagctc ctcaattctc ccccaccctg |
| 1381 | aacatcccgc agggggaggg ggagaggggg aagccgagag ggggctgggc caccccctcc |
| 1441 | cctctgtgca agtggaatgt ctgccctgtg ggtgggtggg cccggccagg gcctctccct |
| 1501 | ccctccctcc ctctctgtcc cttggcaaat ggacaccagg ggcttctccc ctcaaagcca |
| 1561 | taccccgcct ctgggcgggc atggggggtg gtgggtgcca gccaggggca tggacagagc |
| 1621 | ctttttctaa agaaaaagac aaaaagttaa aaaaaaaaaa aagaagaaaa gaaaagaagt |
| 1681 | taatatatac aaagagtcct ccaaggcctg gctgggtgga ggggcgctgc tgagagtgtc |
| 1741 | caccgggcac ccgcctctgc cggccccccg ccgggcgccc caaccccaat ttctggagct |
| 1801 | gcagccgtcc cgcgccccac ccaaggtggg cgccttcccc tcttgtgccc agggcggtgg |
| 1861 | gcgtggtgtc cacccgcccc tcctggtgcc cacggtggat actgcatgat gtgaaccttg |
| 1921 | gttttgaact ctgttcctgc ccctccccga ccgccccagc ctgtgcccgc cccgtgcctg |
| 1981 | ccgtggctgg tgggtggcgg tggtggggcc gggtgggccc ccgcccagcg cctgctggaa |
| 2041 | tgagaagcac agactccgcc acggactcct tttctctccc tcctcccgcc ccgccaggcc |
| 2101 | tggcggcccc cgcccccctc gctggccatt ttgggggagt gagggggcgt ggttgtttct |
| 2161 | tgtggttgtg tgtgtttgtt gttcgggttt taaaaaaggg aaactgagac tgcaggtggg |
| 2221 | ggaggtggtg ggttttgggg ggatgtcccc taatccagga gtgccccctc acttgtcacc |
| 2281 | gagtctcctc tattgcctgc ctctgctgtg aattaacttg ttctgtgtat taaactgggc |
| 2341 | ctgacccctc tgcccacgaa aaaaaaaaaa aaaaaaaa |

SEQ ID NO: 112 Human DPF1 Amino Acid Sequence Isoform D (NP_001276907.1)

| | |
|---|---|
| 1 | mgglsarpta grtdpagtcw gqdpgskmat vipgplslge dfyreaiehc rsynarlcae |
| 61 | rslrlpflds qtgvaqnncy iwmekthrgp glapgqiyty parcwrkkrr lniledprlr |
| 121 | pceykidcea plkkegglpe gpvleallca etgekkielk eeetimdcqk qqllefphdl |
| 181 | evedleddip rrknrakgka ygigglrkrq dtasledrdk pyvcdicgkr yknrpglsyh |
| 241 | yththlaeee geenaerhal pfhrknnhkq fykelawvpe aqrkhtakka pdgtvipngy |
| 301 | cdfclggskk tgcpedlisc adcgrsghps clqftvnmta avrtyrwqci eckscslcgt |
| 361 | sendgaswag ltpqdqllfc ddcdrgyhmy clsppmaepp egswschlcl rhlkekasay |
| 421 | itlt |

SEQ ID NO: 113 Human DPF1 cDNA Sequence Variant 5 (NM_001363579.1, CDS:
106-1272)

| | |
|---|---|
| 1 | gaaatcgtag cgcgctgggc ggcagagcgg gcggcgcagg ccgggctggg cccgcgcgcg |
| 61 | gcggcagcgg cgccccgggc cggaggcggc ccagccgagc gggccatggc caccgccatt |
| 121 | cagaacccgc tcaagtccct aggcgaggac ttctaccgcg aggccatcga gcactgccgc |
| 181 | agttacaacg cgcgcctgtg cgccgagcgc agcctgcgac tgcccttcct cgactcgcag |
| 241 | accggcgtgg cccagaacaa ctgctacatc tggatggaga agacccaccg cgggccgggt |
| 301 | ttggccccgg gacagattta cacgtacccc gcccgctgtt ggaggaagaa acggagactc |
| 361 | aacatcctgg aggaccccag actcaggccc tgcgagtaca agatcgactg tgaagcaccc |
| 421 | ctgaagaagg agggtggcct cccggaaggg ccggtcctcg aggctctact gtgtgcagag |
| 481 | acgggggaga agaagattga gctgaaggag gaggagacca ttatggactg tcagaaacag |
| 541 | cagttgctgg agtttccgca tgacctcgag gtggaagact tggaggatga cattcccagg |
| 601 | aggaagaaca gggccaaagg aaaggcatat ggcatcgggg gtctccggaa acgccaggac |
| 661 | accgcttccc tggaggaccg agacaagccg tatgtctgtg atatctgtgg gaaacggtat |
| 721 | aagaaccggc cggggctcag ctaccactac acccacaccc acctggccga ggaggagggg |
| 781 | gaggagaacg ccgaacgcca cgccctgccc ttccaccgga aaaacaacca taaacagttt |
| 841 | tacaaagaat tggcctgggt ccctgaggca caaaggaaac acacagccaa gaaggcgccc |
| 901 | gacggcactg tcatccccaa cggctactgt gacttctgcc tggggggctc caagaagacg |
| 961 | gggtgtcccg aggacctcat ctcctgtgcg gactgtgggc gatcaggaca cccctcgtgt |
| 1021 | ttacaattca cggtgaacat gacggcagcc gtgcggacct accgctggca gtgcatcgag |
| 1081 | tgcaaatcct gcagcctgtg cggaacctcc gagaacgacg accagctgct gttttgtgat |
| 1141 | gactgcgatc ggggttacca catgtactgc ctgagtcccc ccatggcgga gcccccggaa |
| 1201 | gggagctgga gctgtcacct ctgtctccgg cacctgaagg aaaaggcttc tgcttacatc |
| 1261 | accctcacct aggccggctc ggctcgccgc gactctgggg tggtgctcgc ctacctgcct |
| 1321 | ctccgagctc ctcaattctc ccccaccctg aacatcccgc agggggaggg ggagaggggg |
| 1381 | aagccgagag ggggctgggc caccccctcc cctctgtgca agtggaatgt ctgccctgtg |
| 1441 | ggtgggtggg cccggccagg gcctctccct ccctccctcc ctctctgtcc cttggcaaat |
| 1501 | ggacaccagg ggcttctccc ctcaaagcca taccccgcct ctgggcgggc atggggggtg |
| 1561 | gtgggtgcca gccaggggca tggacagagc ctttttctaa agaaaaagac aaaaagttaa |
| 1621 | aaaaaaaaaa aagaagaaaa gaaaagaagt taatatatac aaagagtcct ccaaggcctg |
| 1681 | gctgggtgga ggggcgctgc tgagagtgtc caccgggcac ccgcctctgc cggccccccg |
| 1741 | ccgggcgccc caaccccaat ttctggagct gcagccgtcc cgcgccccac ccaaggtggg |
| 1801 | cgccttcccc tcttgtgccc agggcggtgg gcgtggtgtc cacccgcccc tcctggtgcc |
| 1861 | cacggtggat actgcatgat gtgaaccttg gttttgaact ctgttcctgc ccctccccga |
| 1921 | ccgccccagc ctgtgcccgc cccgtgcctg ccgtggctgg tgggtggcgg tggtggggcc |
| 1981 | gggtgggccc ccgcccagcg cctgctggaa tgagaagcac agactccgcc acggactcct |
| 2041 | tttctctccc tcctcccgcc ccgccaggcc tggcggcccc cgcccccctc gctggccatt |
| 2101 | ttgggggagt gagggggcgt ggttgtttct tgtggttgtg tgtgtttgtt gttcgggttt |
| 2161 | taaaaaaggg aaactgagac tgcaggtggg ggaggtggtg ggttttgggg ggatgtcccc |
| 2221 | taatccagga gtgccccctc acttgtcacc gagtctcctc tattgcctgc ctctgctgtg |
| 2281 | aattaacttg ttctgtgtat taaactgggc ctgacccctc tgcccacga |

SEQ ID NO: 114 Human DPF1 Amino Acid Sequence Isoform E (NP_001350508.1)

| | |
|---|---|
| 1 | mataiqnplk slgedfyrea iehcrsynar lcaerslrlp fldsqtgvaq nncyiwmekt |
| 61 | hrgpglapgq iytyparcwr kkrrlniled prlrpceyki dceaplkkeg glpegpvlea |
| 121 | llcaetgekk ielkeeetim dcqkqqllef phdlevedle ddiprrknra kgkaygiggl |
| 181 | rkrqdtasle drdkpyvcdi cgkryknrpg lsyhyththl aeeegeenae rhalpfhrkn |
| 241 | nhkqfykela wvpeaqrkht akkapdgtvi pngycdfclg gskktgcped liscadcgrs |
| 301 | ghpsclqftv nmtaavrtyr wqcieckscs lcgtsenddq llfcddcdrg yhmyclsppm |
| 361 | aeppegswsc hlclrhlkek asayitlt |

SEQ ID NO: 115 Mouse DPF1 cDNA Sequence (NM_013874.2, CDS: 77-1243)

| | |
|---|---|
| 1 | gcaggccggg ctgggcccgc gctcagcggc agcagcagcg gcgccccggg ccggaggcgg |
| 61 | cccagccgag cgggccatgg ccaccgccat tcagaacccg ctcaagtccc ttggcgagga |
| 121 | cttctaccgg gaggccatcg agcactgtcg cagctacaac gcgcgcctgt gtgccgagcg |
| 181 | cagcctgcgc ctgcctttcc tcgactcgca gaccggagtg gcccagaaca actgctacat |
| 241 | ctggatggag aagacccacc gcgggcctgg tttggccccg ggacagatct acacttaccc |
| 301 | cgcccgctgt tggaggaaga aacggagact caacatcctg gaggacccca ggctccggcc |
| 361 | ctgcgagtac aagatcgatt gtgaggcacc tctgaagaag gagggtggcc tcccggaagg |
| 421 | gccagtcctc gaggctctgc tgtgtgctga gactggagag aagaaagtgg agctgaagga |
| 481 | ggaggagacc atcatggact gtcagaaaca gcagttgctg gagtttccgc atgatctcga |
| 541 | ggtagaagac ttggaggaag acattcccag gaggaagaac agggcaagag gaaaggcata |
| 601 | tggcattgga ggtctccgca aacgccagga caccgcatcc ctggaggacc gagacaagcc |
| 661 | gtacgtctgt gatatctgtg ggaagagata taagaaccgg ccaggactca gctaccatta |
| 721 | cacccacacc cacctggctg aggaggaggg ggaggagcac actgaacgcc acgccctgcc |
| 781 | tttccaccgg aaaaacaacc ataaacagtt ttacaaagaa ttggcctggg tccccgaggc |
| 841 | acagaggaaa cacacagcca agaaagcacc agatggcact gtcatcccca atggctactg |
| 901 | tgacttttgc ctggggggct ccaagaagac tgggtgtccc gaggacctca tctcctgtgc |
| 961 | ggactgtggg cgatcaggac atccctcgtg tttacagttc acggtgaaca tgaccgcggc |
| 1021 | tgtgcggacc taccgctggc agtgcattga atgcaagtcc tgcagcctgt gtggcacctc |
| 1081 | ggagaatgac gaccagctgc tgttctgtga tgactgcgat cgaggttacc acatgtactg |
| 1141 | cctgagccct cccatggcgg agcccccgga agggagctgg agctgccacc tctgtctccg |
| 1201 | gcacttgaag gaaaaggcct ctgcttacat caccctgacc taggcccggc tctgcttccc |
| 1261 | caggatcttt gggtggtgct atctcctgcc tcttggagct cctggcgctc cccacccggt |
| 1321 | gtccccagtg gaagggatgg ggtgaagccc agagtggggg ggggcaaggt gttctccctc |
| 1381 | tgcaagtgga atgttaccct gtgggtggct gggtccaaca gggtccctcc tgtcccccct |
| 1441 | cttcatccct tgacaaatgg gcaccaggct tctgctctcc tcaaagccat acccccgcct |
| 1501 | ttgggcgggc atagaggggt agtggatgct agccagcagc acggaaagag cctttttcta |
| 1561 | aagaaaaaga caaaacgtgg aaaaaaaagg gaaaaaaatt aatatataca aagagtccta |
| 1621 | taaagcctgg ctgggtggag aggcactgtt gagtgtctgc tggggacctg actttaccag |
| 1681 | tttcctgaat ggcgcctccc cacctcattt ctggagttgc aatggtctca actcccatct |
| 1741 | gaggtgggta ccaccccttc ctcagtaccc accgtggata ctgcatgtga actatggttt |
| 1801 | tgaactcttc ctcctcctcc ttgagagccc cgccctgcgc ccgcgtggtg cctgcctgcc |
| 1861 | aggcctgggg cgtgcagccg gggaggcggg tggggtgagg caggcaggca gccagccccc |
| 1921 | tgcagtgaga agcacagatt gcaatggact cagttttttt tttttttttt tttttttttc |
| 1981 | ctttctccct tcccacccct ttccttccct acccagccag gctgggctgc ctcctgcccc |
| 2041 | cctcgctagc catttggggg tggcaagggg gtgtggttgt ttctcgtggt tgtgtgtgtt |
| 2101 | tgttgttcgg gtttttaaaa ggggaaattg agactgcaag tgggggaggt ggagggtctg |
| 2161 | ggggagtctg cccccaatcc aggagtaccc cccttgccac caagtctcct ttattgcctg |
| 2221 | cctctgctgt gaattaactt gttctgtgta ttaaactggg cctgacccct ctgcccac |

SEQ ID NO: 116 Mouse DPF1 Amino Acid Sequence (NP_038902.1)

| | |
|---|---|
| 1 | mataiqnplk slgedfyrea iehcrsynar lcaerslrlp fldsqtgvaq nncyiwmekt |
| 61 | hrgpglapgq iytyparcwr kkrrlniled prlrpceyki dceaplkkeg glpegpvlea |
| 121 | llcaetgekk velkeeetim dcqkqqllef phdlevedle ediprrknra rgkaygiggl |
| 181 | rkrqdtasle drdkpyvcdi cgkryknrpg lsyhyththl aeeegeehte rhalpfhrkn |
| 241 | nhkqfykela wvpeaqrkht akkapdgtvi pngycdfclg gskktgcped liscadcgrs |
| 301 | ghpsclqftv nmtaavrtyr wqcieckscs lcgtsenddq llfcddcdrg yhmyclsppm |
| 361 | aeppegswsc hlclrhlkek asayitlt |

SEQ ID NO: 117 Human DPF2 cDNA Sequence Variant 1 (NM_006268.4, CDS: 134-
1309)

| | |
|---|---|
| 1 | agtgctcgct ctagtgcgcg cgcccggacg gcgcctgcgc agagggcaag gaacctggta |
| 61 | ccccggtgcg gtcccggcgc ctgcgcgctg cggactgtgg ggcttctcgg cccgaggcag |
| 121 | aggaacaggg aagatggcgg ctgtggtgga gaatgtagtg aagctccttg gggagcagta |
| 181 | ctacaaagat gccatggagc agtgccacaa ttacaatgct cgcctctgtg ctgagcgcag |
| 241 | cgtgcgcctg cctttcttgg actcacagac cggagtagcc cagagcaatt gttacatctg |
| 301 | gatggaaaag cgacaccggg gtccaggatt ggcctccgga cagctgtact cctaccctgc |
| 361 | ccggcgctgg cggaaaaagc ggcgagccca tccccctgag gatccacgac tttccttccc |
| 421 | atctattaag ccagacacag accagaccct gaagaaggag gggctgatct ctcaggatgg |
| 481 | cagtagttta gaggctctgt tgcgcactga ccccctggag aagcgaggtg ccccggatcc |
| 541 | ccgagttgat gatgacagcc tgggcgagtt tcctgtgacc aacagtcgag cgcgaaagcg |
| 601 | gatcctagaa ccagatgact tcctggatga cctcgatgat gaagactatg aagaagatac |
| 661 | tcccaagcgt cggggaaagg ggaaatccaa gggtaagggt gtgggcagtg cccgtaagaa |
| 721 | gctggatgct tccatcctgg aggaccggga taagccctat gcctgtgaca tttgtggaaa |
| 781 | acgttacaag aaccgaccag gcctcagtta ccactatgcc cactcccact tggctgagga |
| 841 | ggagggcgag gacaaggaag actctcaacc acccactcct gtttcccaga ggtctgagga |
| 901 | gcagaaatcc aaaaagggtc ctgatggatt ggccttgccc aacaactact gtgacttctg |
| 961 | cctgggggac tcaaagatta acaagaagac gggacaaccc gaggagctgg tgtcctgttc |
| 1021 | tgactgtggc cgctcagggc atccatcttg cctccaattt acccccgtga tgatggcggc |
| 1081 | agtgaagaca taccgctggc agtgcatcga gtgcaaatgt tgcaatatct gcggcacctc |
| 1141 | cgagaatgac gaccagttgc tcttctgtga tgactgcgat cgtggctacc acatgtactg |
| 1201 | tctcaccccg tccatgtctg agccccctga aggaagttgg agctgccacc tgtgtctgga |
| 1261 | cctgttgaaa gagaaagctt ccatctacca gaaccagaac tcctcttgat gtggccaccc |
| 1321 | acctgctccc cgacatatct aaggctgttt ctctcctcca cttcatattt catacccatc |
| 1381 | tttcccttct tcctcctctc cttcacaaat ccagagaacc ttggggtggt tgtgccagcc |
| 1441 | tgcctttggc agctgcaagc tgaggtggca gctctgacca cctctggccc caggccctca |
| 1501 | gggagaaagg agcaacacac tgcccctagg cgtgcgtgtg gcccagtttc tctctgctct |
| 1561 | ccattaagtg cattcactct gcttgccttg ggcccagccc ctggtgatca cagggttcaa |
| 1621 | acagtgtcct cctagaaaga gtgggagagc agctcacttc tctgtgttct gcctcccctc |
| 1681 | tggtctccag agttttcctg tcctctagag gcaagccagg ccagggagct gggagcgagc |
| 1741 | aagctgaggc cacgtccaca aggagctttt catgcccctg tgccgcatag cctcacctct |
| 1801 | ttcctccaga gtggctctct gcggccctgt gttcctgcta cagagtgttc ttttctggag |
| 1861 | tcaggatgtt ctcggtcacc ctcctggttc tgccctgtcc cattccaccc caccccaggg |
| 1921 | ggaacagtag cttcaccttg ttattcccat tgctctcctg gctcactctt acggtcggtc |
| 1981 | tccagtgact gaagcattcc ccacccttgg aatttctcat cttctgcctc ccttcctact |
| 2041 | ccttttggtt ttgtggggag aggggaagga tcagggggcc aggccagcag ctcgggggcc |
| 2101 | acaaggagat ggataatgtg cctgtttttt aacacaacaa aaaagcctac ctccaaaatc |
| 2161 | ccctttttgt tcttcctgga cctgggcatt cagcctcctg ctcttaactg aattgggagc |
| 2221 | ctctgccacc tgccccgtgt atcctggctc tcagctcatg gggaagccac atagacatcc |
| 2281 | ctttcttccc ttgcacgctc gctagcagct ggtaaggtct tcacaccctg attcctcaag |
| 2341 | ttttctgctt agtggcactg acattaagta gtggggggac agtccatgcc aggacaccct |
| 2401 | ggagtagcct tcccccttgg ccgtgggcag gccctaactc actgtcgctt tggagttgag |
| 2461 | gtgtcttttt tttttctttc tttagttcct gtattctaaa cattagtaaa aataaatgtt |
| 2521 | tttacacaga aaaaaaaaaa aaaaa |

SEQ ID NO: 118 Human DPF2 Amino Acid Sequence Isoform 1 (NP_006259.1)

| | |
|---|---|
| 1 | maavvenvvk llgeqyykda meqchnynar lcaersvrlp fldsqtgvaq sncyiwmekr |
| 61 | hrgpglasgq lysyparrwr kkrrahpped prlsfpsikp dtdqtlkkeg lisqdgssle |
| 121 | allrtdplek rgapdprvdd dslgefpvtn srarkrilep ddflddldde dyeedtpkrr |
| 181 | gkgkskgkgv gsarkkldas iledrdkpya cdicgkrykn rpglsyhyah shlaeeeged |
| 241 | kedsqpptpv sqrseeqksk kgpdglalpn nycdfclgds kinkktgqpe elvscsdcgr |
| 301 | sghpsclqft pvmmaavkty rwqcieckcc nicgtsendd qllfcddcdr gyhmycltps |
| 361 | mseppegsws chlcldllke kasiyqnqns s |

SEQ ID NO: 119 Human DPF2 cDNA Sequence Variant 2 (NM_001330308.1, CDS:
134-1351)

| | |
|---|---|
| 1 | agtgctcgct ctagtgcgcg cgcccggacg gcgcctgcgc agagggcaag gaacctggta |
| 61 | ccccggtgcg gtcccggcgc ctgcgcgctg cggactgtgg ggcttctcgg cccgaggcag |
| 121 | aggaacaggg aagatggcgg ctgtggtgga gaatgtagtg aagctccttg gggagcagta |
| 181 | ctacaaagat gccatggagc agtgccacaa ttacaatgct cgcctctgtg ctgagcgcag |
| 241 | cgtgcgcctg cctttcttgg actcacagac cggagtagcc cagagcaatt gttacatctg |
| 301 | gatggaaaag cgacaccggg gtccaggatt ggcctccgga cagctgtact cctaccctgc |
| 361 | ccggcgctgg cggaaaaagc ggcgagccca tccccctgag gatccacgac tttccttccc |
| 421 | atctattaag ccagacacag accagaccct gaagaaggag gggctgatct ctcaggatgg |
| 481 | cagtagttta gaggctctgt tgcgcactga ccccctggag aagcgaggtg ccccggatcc |
| 541 | ccgagttgat gatgacagcc tgggcgagtt tcctgtgacc aacagtcgag cgcgaaagcg |
| 601 | gatcctagaa ccagatgact tcctggatga cctcgatgat gaagactatg aagaagatac |
| 661 | tcccaagcgt cggggaaagg ggaaatccaa gggtaagggt gtgggcagtg cccgtaagaa |
| 721 | gctggatgct tccatcctgg aggaccggga taagccctat gcctgtgaca atagtttcaa |
| 781 | acaaaagcat acctcgaaag cgccccagag agtttgtgga aaacgttaca agaaccgacc |
| 841 | aggcctcagt taccactatg cccactccca cttggctgag gaggagggcg aggacaagga |
| 901 | agactctcaa ccacccactc ctgtttccca gaggtctgag gagcagaaat ccaaaaaggg |
| 961 | tcctgatgga ttggccttgc ccaacaacta ctgtgacttc tgcctggggg actcaaagat |
| 1021 | taacaagaag acgggacaac ccgaggagct ggtgtcctgt tctgactgtg gccgctcagg |
| 1081 | gcatccatct tgcctccaat ttacccccgt gatgatggcg gcagtgaaga cataccgctg |
| 1141 | gcagtgcatc gagtgcaaat gttgcaatat ctgcggcacc tccgagaatg acgaccagtt |
| 1201 | gctcttctgt gatgactgcg atcgtggcta ccacatgtac tgtctcaccc cgtccatgtc |
| 1261 | tgagccccct gaaggaagtt ggagctgcca cctgtgtctg gacctgttga aagagaaagc |
| 1321 | ttccatctac cagaaccaga actcctcttg atgtggccac ccacctgctc cccgacatat |
| 1381 | ctaaggctgt ttctctcctc cacttcatat ttcataccca tctttccctt cttcctcctc |
| 1441 | tccttcacaa atccagagaa ccttggggtg gttgtgccag cctgcctttg gcagctgcaa |
| 1501 | gctgaggtgg cagctctgac cacctctggc cccaggccct cagggagaaa ggagcaacac |
| 1561 | actgccccta ggcgtgcgtg tggcccagtt tctctctgct ctccattaag tgcattcact |
| 1621 | ctgcttgcct tgggcccagc ccctggtgat cacagggttc aaacagtgtc ctcctagaaa |
| 1681 | gagtgggaga gcagctcact tctctgtgtt ctgcctcccc tctggtctcc agagttttcc |
| 1741 | tgtcctctag aggcaagcca ggccagggag ctgggagcga gcaagctgag gccacgtcca |
| 1801 | caaggagctt ttcatgcccc tgtgccgcat agcctcacct ctttcctcca gagtggctct |
| 1861 | ctgcggccct gtgttcctgc tacagagtgt tcttttctgg agtcaggatg ttctcggtca |
| 1921 | ccctcctggt tctgccctgt cccattccac cccaccccag ggggaacagt agcttcacct |
| 1981 | tgttattccc attgctctcc tggctcactc ttacggtcgg tctccagtga ctgaagcatt |
| 2041 | ccccaccctt ggaatttctc atcttctgcc tcccttccta ctccttttgg ttttgtgggg |
| 2101 | agaggggaag gatcaggggg ccaggccagc agctcggggg ccacaaggag atggataatg |
| 2161 | tgcctgtttt ttaacacaac aaaaaagcct acctccaaaa tccccttttt gttcttcctg |
| 2221 | gacctgggca ttcagcctcc tgctcttaac tgaattggga gcctctgcca cctgccccgt |
| 2281 | gtatcctggc tctcagctca tggggaagcc acatagacat ccctttcttc ccttgcacgc |
| 2341 | tcgctagcag ctggtaaggt cttcacaccc tgattcctca agttttctgc ttagtggcac |
| 2401 | tgacattaag tagtgggggg acagtccatg ccaggacacc ctggagtagc cttccccctt |
| 2461 | ggccgtgggc aggccctaac tcactgtcgc tttggagttg aggtgtcttt tttttttctt |
| 2521 | tctttagttc ctgtattcta aacattagta aaaataaatg tttttacaca gagccctctg |
| 2581 | ctggatggtt tatctcctgc ctttctccat taagaaggcc atttcatcct aagatttcca |
| 2641 | tgatggtggt tttttttttt aatgttttga aatacagctt ttttcccccc aaattaaaat |
| 2701 | ttttttgtgg aaccccaata tgtaaagcga atataaaatt ggttattttg ttttgttaca |
| 2761 | taaattcaag tttataacaa ttctttgtta taaagaacaa tgaagctgtt ttgatcaata |
| 2821 | caaaatttgg gttaaaatca actttaacat ctatttttat gtttcagttg atttggagaa |
| 2881 | ttctcctagt cttggataca tagatggaag tgatgacagg tttataacag ttgaccttgc |
| 2941 | aatctcagac atttaaaaca ggaccagaag tttatataaa tataattaat aagcaaacta |
| 3001 | atgacatcac catgggacac acacaaaagt tcttgcagga gcagggtctg tgtggcttca |
| 3061 | gttgcctgca gcgctcccag gccagagcaa gtgctctagg atctgaactg cccgcagtgc |
| 3121 | agccctgcag cctttcccag ggcacgttga tgtgcacaca gtttccctga aggcaaagtg |
| 3181 | aacatgtgga gagcttacgt ggcagcgcgt atgtcttcag tgtgtgtttt agaagtccaa |
| 3241 | ctgttgtttt tatgttttta aaggaaagat ttgaatcaag cagttatggg ccccctgaag |
| 3301 | tatccttttt tctagaacat tctgaaagtc atccttgcct atgggaagcc taggccggcc |
| 3361 | tgcactgtta tgttcaataa ataagcaggg tgctctgggc tggggattgt gtgaggagca |
| 3421 | gagcgcagcc cgtcctcatg cttttccact gaagtaggcc aggcagagag ggagtacagc |
| 3481 | aatggatgcg ctttggcagc tgagtagtcc gagagccaga aaagaaatgt ggaaaataag |
| 3541 | aacgctgtag caggcctagg tgaggaaatt taggaagggt ttgcgggagg taggatttga |
| 3601 | gatgggtctt ggagagttgg acagtgtcag ccggtaggac gggggtgcgg acggaagcct |
| 3661 | gtgaggaagg cagaggatgc ggagctgtga gcggagggag cagcgaggct ggagagcagc |
| 3721 | tgggctgcgg gtcaagacgt ctgcgtttaa ttcgggactg aaggttagca gggaagggaa |
| 3781 | cgatgccaga tcttgagttt aagaacttga atcttgtaaa gtaccaaatc taataaaata |
| 3841 | ctcgtcctaa ataaaaaaaa aaaaaaaaaa aaaaaaaaaa aaaaaaaaaa aaaaaaa |

SEQ ID NO: 120 Human DPF2 Amino Acid Sequence Isoform 2 (NP_001317237.1)

| | |
|---|---|
| 1 | maavvenvvk llgeqyykda meqchnynar lcaersvrlp fldsqtgvaq sncyiwmekr |
| 61 | hrgpglasgq lysyparrwr kkrrahpped prlsfpsikp dtdqtlkkeg lisqdgssle |
| 121 | allrtdplek rgapdprvdd dslgefpvtn srarkrilep ddflddldde dyeedtpkrr |
| 181 | gkgkskgkgv gsarkkldas iledrdkpya cdnsfkqkht skapqrvcgk ryknrpglsy |
| 241 | hyahshlaee egedkedsqp ptpvsqrsee qkskkgpdgl alpnnycdfc lgdskinkkt |
| 301 | gqpeelvscs dcgrsghpsc lqftpvmmaa vktyrwqcie ckccnicgts enddqllfcd |
| 361 | dcdrgyhmyc ltpsmseppe gswschlcld llkekasiyq nqnss |

SEQ ID NO: 121 Mouse DPF2 cDNA Sequence Variant 1 (NM_001291078.1, CDS:
100-1317)

| | |
|---|---|
| 1 | cctgcgcaga gggtcgagga ccctgtgtcc tgagaaggct tagcgcctgc gcgttgtagg |
| 61 | tttcggggcc tcccggcctg agggagagga acagggaaga tggcggctgt ggtggagaat |
| 121 | gtagtgaagc tccttggcga gcaatactac aaagatgcca tggaacagtg ccacaattat |
| 181 | aacgcccgcc tctgtgctga acgtagtgtg cgcctgcctt tcctggactc acagactgga |
| 241 | gtagcccaga gcaattgtta tatctggatg gaaaagcgac accggggacc aggattggcc |
| 301 | tctggacagt tatactccta tcctgccaga cgctggcgga aaaagcgccg agcccaccca |
| 361 | cctgaggatc ccaggctttc tttcccatcg attaaaccag acactgacca gactctgaag |
| 421 | aaagaggggc ttatctctca ggatggcagc agtttagagg ctctgttgcg tactgatccc |
| 481 | ctggagaaac ggggtgcccc agatccccga gttgacgatg acagcctggg cgagtttcct |
| 541 | gttagcaaca gtcgagcacg gaagcggatc attgaacccg atgacttcct tgatgacctt |
| 601 | gatgatgagg actatgaaga agatacgcca aagcgtcggg ggaaggggaa gtccaagagt |
| 661 | aagggtgtga gcagtgcccg gaagaagctg gatgcttcca tcctggagga ccgggataag |
| 721 | ccctatgcct gtgacaatag tttcaaacaa aagcatacct cgaaagcgcc ccagagagtt |
| 781 | tgtggaaaac gttacaagaa ccgacctggc ctcagttacc actatgccca ctcccacctg |
| 841 | gctgaagagg aaggagagga caaagaagac tcccgacccc ccactcctgt gtcccagagg |
| 901 | tctgaggagc agaaatccaa gaaaggacct gatggattgg ccctgcctaa caactactgt |
| 961 | gacttctgcc taggagactc aaaaatcaac aagaagacag ggcagcccga ggagctagtg |
| 1021 | tcctgttccg actgtggccg ctcagggcat ccgtcctgcc tgcagttcac ccctgtgatg |
| 1081 | atggcggccg tgaagaccta ccgctggcag tgcatcgaat gcaagtgctg caacctctgc |
| 1141 | ggcacgtcgg agaacgatga ccagctactt ttctgtgatg actgtgaccg tggctaccac |
| 1201 | atgtactgtc tcactccttc catgtctgag cctcctgaag gaagttggag ttgccacctg |
| 1261 | tgtctggatc tgctgaagga gaaagcatcc atctaccaga accagaactc ctcctgatgt |
| 1321 | gccacccagc tcccctgcat ctaaggccgt tgctctcctc tctaccttgg tttccattgc |
| 1381 | ccctctctcc tctttcactc tgtagtcctg ccaacctccg ttggcaacag cacagggagg |
| 1441 | tggcagctct gactgcctct agccccgagc cctcagggag taaggagcag cgtgctgctc |
| 1501 | cagggctgac ctgtgggtcc aacttctctc tgctctccaa gaagtgcatt cactctgcct |
| 1561 | gccttgggcc taagaccctg gtgattacag ggctcaaatg gggtcctctg agaaggaata |
| 1621 | tgagagcagc tcacttgtct caagccttgc ccacccctct tcccccaaac cccctttggt |
| 1681 | ttccagggtt ttgccccaga gatgagccag gctgggcctt tcctggaagc agctggagtg |
| 1741 | agctggctga gtggcacttg ccaggacctt ttcataccct agttctgctt ccctttgcct |
| 1801 | cctgccaaag cagtcccctg tcctctgtca tgctacatgg ggttctgtgc ttgagctaga |
| 1861 | atgttctcgg gcacctcctg gctctgccct gtcccacaaa gggacgagca gcttcaaacc |
| 1921 | tgtcctccct gtgcttggtg gcttgctcac aggtgcgctc tggctaccca gacatttcct |
| 1981 | atcctcagaa cttcccatct tctgccccca tccttagtcc ctttgctttt gtagggagag |
| 2041 | ggatagtgtc aggggctggg ccagcagctt gggggccaca gggagaagtt ggataatgtg |
| 2101 | cctgtttttt aactcgataa aaaagcctac ctccaaaatt ccctttttgt tcttcctgaa |
| 2161 | cctgggcatt cagcctcctg tccttaacta aattaggagc ctctgcctcc tgcctgtgta |
| 2221 | tcctggctcc caggacacag gatggtcccc tttccttgca cgctagctag tagctggtaa |
| 2281 | ggtcttcaca ccctgagttt tctgtttcct gcttagtggc actgacatta agtaggaggg |
| 2341 | gacagtcctc tgcagtactc tagagagtgg gcttccccct tggctgtggg caggccctaa |
| 2401 | ctgttttctg caaagttgag ggccccccct cgcatattta gttcctgtat tcaaaacatt |
| 2461 | agtaaaaata aacattttta cagagtcttc tgctggacag tttgtctctt gactccttgt |
| 2521 | tgaaaggttg tttcatttca aacttacgac aatagggttt tttgttggtg gtggttggtt |
| 2581 | gttttaaatt gaaacaactt tttctcccaa aatcaaagtt tttgttaaac tccaccatgt |
| 2641 | aaaattattt tgttagtttt gttatgtaaa ttcagattta taacaattta gtggtataaa |
| 2701 | ggatgaagct aattaataca aaaattgggt taaaatcaac tttagcattt tctctgtatc |
| 2761 | tgtgcttttg gctggttgga aagactttac tcggtgtgaa tatgtaggcg gaggtgcggc |
| 2821 | agatctatgg cactgcagtg tctcctggtt aaagtgaacc cagaagcttg tttgtgcttt |
| 2881 | aaactccaag gagttatgag ttaagcctgg agagagagcg cagcagagga gaggatgctc |
| 2941 | gttgttcttg cagagggcca agtttggttc ccagcactca aatccggtgg ctcacaacca |
| 3001 | cctgtagctc cagctccagg agctggggag gtcaactgtg ctcctgcaaa cacccacctg |
| 3061 | cccactcatc ttcatccatc tacaaaccta ccagtgtcat cgtagaacaa aagaagccga |
| 3121 | gaggagagta acctcagatc ctgtcatctg atgaaccttt tcattgcctg tcggattgct |
| 3181 | aagccaaagc agagttgcaa agccagaatt gtccacagtg cagggtgtca tgtgcagacc |
| 3241 | gtgagtgagt ttatatccag ccagattagt acttggatgt tatatagtgg atcttgtata |
| 3301 | gctcacttgg tatgtattaa cattttaact tttttctttt aaagatttat ttattt |

SEQ ID NO: 122 Mouse DPF2 Amino Acid Sequence Isoform 1 (NP_001278007.1)

| | |
|---|---|
| 1 | maavvenvvk llgeqyykda meqchnynar lcaersvrlp fldsqtgvaq sncyiwmekr |
| 61 | hrgpglasgq lysyparrwr kkrrahpped prlsfpsikp dtdqtlkkeg lisqdgssle |
| 121 | allrtdplek rgapdprvdd dslgefpvsn srarkriiep ddflddldde dyeedtpkrr |
| 181 | gkgkskskgv ssarkkldas iledrdkpya cdnsfkqkht skapqrvcgk ryknrpglsy |
| 241 | hyahshlaee egedkedsrp ptpvsqrsee qkskkgpdgl alpnnycdfc lgdskinkkt |
| 301 | gqpeelvscs dcgrsghpsc lqftpvmmaa vktyrwqcie ckccnlcgts enddqllfcd |
| 361 | dcdrgyhmyc ltpsmseppe gswschlcld llkekasiyq nqnss |

SEQ ID NO: 123 Mouse DPF2 cDNA Sequence Variant 2 (NM_011262.5, CDS: 100-
1275)

| | |
|---|---|
| 1 | cctgcgcaga gggtcgagga ccctgtgtcc tgagaaggct tagcgcctgc gcgttgtagg |
| 61 | tttcggggcc tcccggcctg agggagagga acagggaaga tggcggctgt ggtggagaat |
| 121 | gtagtgaagc tccttggcga gcaatactac aaagatgcca tggaacagtg ccacaattat |
| 181 | aacgcccgcc tctgtgctga acgtagtgtg cgcctgcctt tcctggactc acagactgga |
| 241 | gtagcccaga gcaattgtta tatctggatg gaaaagcgac accggggacc aggattggcc |
| 301 | tctggacagt tatactccta tcctgccaga cgctggcgga aaaagcgccg agcccaccca |
| 361 | cctgaggatc ccaggctttc tttcccatcg attaaaccag acactgacca gactctgaag |
| 421 | aaagaggggc ttatctctca ggatggcagc agtttagagg ctctgttgcg tactgatccc |
| 481 | ctggagaaac ggggtgcccc agatccccga gttgacgatg acagcctggg cgagtttcct |
| 541 | gttagcaaca gtcgagcacg gaagcggatc attgaacccg atgacttcct tgatgacctt |
| 601 | gatgatgagg actatgaaga agatacgcca aagcgtcggg ggaaggggaa gtccaagagt |
| 661 | aagggtgtga gcagtgcccg gaagaagctg gatgcttcca tcctggagga ccgggataag |
| 721 | ccctatgcct gtgacatttg tggaaaacgt tacaagaacc gacctggcct cagttaccac |
| 781 | tatgcccact cccacctggc tgaagaggaa ggagaggaca aagaagactc ccgacccccc |
| 841 | actcctgtgt cccagaggtc tgaggagcag aaatccaaga aaggacctga tggattggcc |
| 901 | ctgcctaaca actactgtga cttctgccta ggagactcaa aaatcaacaa gaagacaggg |
| 961 | cagcccgagg agctagtgtc ctgttccgac tgtggccgct cagggcatcc gtcctgcctg |
| 1021 | cagttcaccc ctgtgatgat ggcggccgtg aagacctacc gctggcagtg catcgaatgc |
| 1081 | aagtgctgca acctctgcgg cacgtcggag aacgatgacc agctactttt ctgtgatgac |
| 1141 | tgtgaccgtg gctaccacat gtactgtctc actccttcca tgtctgagcc tcctgaagga |
| 1201 | agttggagtt gccacctgtg tctggatctg ctgaaggaga aagcatccat ctaccagaac |
| 1261 | cagaactcct cctgatgtgc cacccagctc ccctgcatct aaggccgttg ctctcctctc |
| 1321 | taccttggtt tccattgccc ctctctcctc tttcactctg tagtcctgcc aacctccgtt |
| 1381 | ggcaacagca cagggaggtg gcagctctga ctgcctctag ccccgagccc tcagggagta |
| 1441 | aggagcagcg tgctgctcca gggctgacct gtgggtccaa cttctctctg ctctccaaga |
| 1501 | agtgcattca ctctgcctgc cttgggccta agaccctggt gattacaggg ctcaaatggg |
| 1561 | gtcctctgag aaggaatatg agagcagctc acttgtctca agccttgccc acccctcttc |
| 1621 | ccccaaaccc cctttggttt ccagggtttt gccccagaga tgagccaggc tgggcctttc |
| 1681 | ctggaagcag ctggagtgag ctggctgagt ggcacttgcc aggacctttt cataccctag |
| 1741 | ttctgcttcc ctttgcctcc tgccaaagca gtcccctgtc ctctgtcatg ctacatgggg |
| 1801 | ttctgtgctt gagctagaat gttctcgggc acctcctggc tctgccctgt cccacaaagg |
| 1861 | gacgagcagc ttcaaacctg tcctccctgt gcttggtggc ttgctcacag gtgcgctctg |
| 1921 | gctacccaga catttcctat cctcagaact tcccatcttc tgcccccatc cttagtccct |
| 1981 | ttgcttttgt agggagaggg atagtgtcag gggctgggcc agcagcttgg gggccacagg |
| 2041 | gagaagttgg ataatgtgcc tgttttttaa ctcgataaaa aagcctacct ccaaaattcc |
| 2101 | ctttttgttc ttcctgaacc tgggcattca gcctcctgtc cttaactaaa ttaggagcct |
| 2161 | ctgcctcctg cctgtgtatc ctggctccca ggacacagga tggtcccctt tccttgcacg |
| 2221 | ctagctagta gctggtaagg tcttcacacc ctgagttttc tgtttcctgc ttagtggcac |
| 2281 | tgacattaag taggagggga cagtcctctg cagtactcta gagagtgggc ttcccccttg |
| 2341 | gctgtgggca ggccctaact gttttctgca aagttgaggg ccccccctcg catatttagt |
| 2401 | tcctgtattc aaaacattag taaaaataaa catttttaca gagtcttctg ctggacagtt |
| 2461 | tgtctcttga ctccttgttg aaaggttgtt tcatttcaaa cttacgacaa tagggttttt |
| 2521 | tgttggtggt ggttggttgt tttaaattga aacaactttt tctcccaaaa tcaaagtttt |
| 2581 | tgttaaactc caccatgtaa aattattttg ttagttttgt tatgtaaatt cagatttata |
| 2641 | acaatttagt ggtataaagg atgaagctaa ttaatacaaa aattgggtta aaatcaactt |
| 2701 | tagcattttc tctgtatctg tgcttttggc tggttggaaa gactttactc ggtgtgaata |
| 2761 | tgtaggcgga ggtgcggcag atctatggca ctgcagtgtc tcctggttaa agtgaaccca |
| 2821 | gaagcttgtt tgtgctttaa actccaagga gttatgagtt aagcctggag agagagcgca |
| 2881 | gcagaggaga ggatgctcgt tgttcttgca gagggccaag tttggttccc agcactcaaa |
| 2941 | tccggtggct cacaaccacc tgtagctcca gctccaggag ctggggaggt caactgtgct |
| 3001 | cctgcaaaca cccacctgcc cactcatctt catccatcta caaacctacc agtgtcatcg |
| 3061 | tagaacaaaa gaagccgaga ggagagtaac ctcagatcct gtcatctgat gaaccttttc |
| 3121 | attgcctgtc ggattgctaa gccaaagcag agttgcaaag ccagaattgt ccacagtgca |
| 3181 | gggtgtcatg tgcagaccgt gagtgagttt atatccagcc agattagtac ttggatgtta |
| 3241 | tatagtggat cttgtatagc tcacttggta tgtattaaca ttttaacttt tttcttttaa |
| 3301 | agatttattt attt |

SEQ ID NO: 124 Mouse DPF2 Amino Acid Sequence Isoform 2 (NP_035392.1)

| | |
|---|---|
| 1 | maavvenvvk llgeqyykda meqchnynar lcaersvrlp fldsqtgvaq sncyiwmekr |
| 61 | hrgpglasgq lysyparrwr kkrrahpped prlsfpsikp dtdqtlkkeg lisqdgssle |
| 121 | allrtdplek rgapdprvdd dslgefpvsn srarkriiep ddflddldde dyeedtpkrr |
| 181 | gkgkskskgv ssarkkldas iledrdkpya cdicgkrykn rpglsyhyah shlaeeeged |
| 241 | kedsrpptpv sqrseeqksk kgpdglalpn nycdfclgds kinkktgqpe elvscsdcgr |
| 301 | sghpsclqft pvmmaavkty rwqcieckcc nlcgtsendd qllfcddcdr gyhmycltps |
| 361 | mseppegsws chlcldllke kasiyqnqns s |

SEQ ID NO: 125 Human DPF3 cDNA Sequence Variant 1 (NM_012074.4, CDS: 29-
1102)

| | |
|---|---|
| 1 | agacaatatt ctgttacatt gtagcaaaat ggcgactgtc attcacaacc ccctgaaagc |
| 61 | gctcggggac cagttctaca aggaagccat tgagcactgc cggagttaca actcacggct |
| 121 | gtgtgcagag cgcagcgtgc gtcttccctt cctggactca cagactgggg tggcccagaa |
| 181 | caactgctac atctggatgg agaagaggca ccgaggccca ggccttgccc cgggccagct |
| 241 | gtatacatac cctgcccgct gctggcgcaa gaagagacga ttgcacccac ctgaagatcc |
| 301 | aaaactgcgg ctgctggaga taaaacctga agtggagctt cccctgaaga aggatgggtt |
| 361 | cacctcagag agcaccacgc tggaagcctt gctccgtggc gagggggttg agaagaaggt |
| 421 | ggatgccagg gaggaggaaa gcatccagga aatacagagg gttttggaaa atgatgaaaa |
| 481 | tgtagaagaa gggaatgaag aagaggattt ggaagaggat attcccaagc gaaagaacag |
| 541 | gactagagga cgggctcgcg gctctgcagg gggcaggagg aggcacgacg ccgcctctca |
| 601 | ggaagaccac gacaaacctt acgtctgtga catctgtggc aagcgctaca agaaccgacc |
| 661 | ggggctcagc taccactatg ctcacactca cctggccagc gaggaggggg atgaagctca |
| 721 | agaccaggag actcggtccc cacccaacca cagaaatgag aaccacaggc cccagaaagg |
| 781 | accggatgga acagtcattc ccaataacta ctgtgacttc tgcttggggg gctccaacat |
| 841 | gaacaagaag agtgggcggc ctgaagagct ggtgtcctgc gcagactgtg gacgctctgc |
| 901 | tcatttggga ggagaaggca ggaaggagaa ggaggcagcg gccgcagcac gtaccacgga |
| 961 | ggacttattc ggttccacgt cagaaagtga cacgtcaact ttccacggct ttgatgagga |
| 1021 | cgatttggaa gagcctcgct cctgtcgagg acgccgcagt ggccggggtt cgcccacagc |
| 1081 | agataaaaag ggcagttgct aaacccacgg aacagactct ctgggcaatt agccatcccc |
| 1141 | ctctgacttt ggtcattgtg ctggttctga tatatatttt ttttaatgaa aggcaacttt |
| 1201 | agattttccc tctatccttg ctttttttcc cttcacctcc cacgtgtccc tccatccctc |
| 1261 | cccccacccc tctgttttgg gtatgtacaa cagaagcaca aactactgaa acaaaacaaa |
| 1321 | acagcagaat gagcgttctt ccgagagatg gcatcgtgat gcgctattta ttttccatag |
| 1381 | aaataggaag ttagacggat tgtctctttt ctgaggggag ggggtctttt tgacaggagc |
| 1441 | agagttgatg tcctcaattt tcatatttat tggcaaaagg aagagaagag gaactttggg |
| 1501 | ttggaaacaa agaaccaata acattaaaac attattattt atatattcta gctgttatta |
| 1561 | gaatcagact ttttttgcga gagagagaga gagagagaga gaagggaaat caaagaaatc |
| 1621 | gaagcaatat cctgtttaga ggcaagccgc ccggtgggga gaatttcctc aatgggagac |
| 1681 | ggttgcacta ttctgtgccc cacggagttt gcggctcccc gcggcagacc cctccctcat |
| 1741 | tctcctccct gacctttcca tcttcctctc tgcttgcgag aaaatgtcag tagttccaga |
| 1801 | gaagtcgggg tgcctatgcc tggcctccct ccacacctgg gccctgacca gccgcctcct |
| 1861 | gggctcctcc tcctccgtca gtagagctgc tgttttgtta ttgctggttt ttcctcactt |
| 1921 | tcctcctggc aaagaacgac ttccaaatgc agggatggaa tataagcaga acgtcatggg |
| 1981 | ctcagcagtg actccaccac ccgaggccga ggccgtgctt ctggaagata gaaggagaca |
| 2041 | tcatcgtgtg tttcccctcc ccttgcccct gttaagaaac gtatcaatac ccattggatg |
| 2101 | atcaaggcta ccgtatttct tctatttttt tttatagtgc ctgccaggca ctttgtttta |
| 2161 | tgtttccaat agcacttcct gaaataaacc aaagcaacac tgctcaaggc ccctggggcg |
| 2221 | atggagaagg ccacccacct cactgacagt cccaagaatg accggctgcg aggtcctagt |
| 2281 | caaaagtcaa cattatgacc tggggactcc agcatccttc aagcaagcca tttccgaaga |
| 2341 | aggtgaaaag aagccaggat gattggcacc tcctcctcct cctcctcttc ttcctcttcc |
| 2401 | cttgcccagc cccctcctgt gcgtgtgttt cagacaacac aggagccagc acaggagtgg |
| 2461 | aaaatcctgc agcgcaactc agctcagccc acagaagcct tgggaatggc ctcagtttgt |
| 2521 | gcaataagaa gatttttttt ttctttttaa atcttcatta tattttcttt gattgtctgt |
| 2581 | gagaaagtac ccaggtccgc ctggaattac tctacagtag aaataactga acacaaacaa |
| 2641 | actgatggaa aaaaagagtt aactatttta tttatttcaa tatttaaaag gaaaaaagtg |
| 2701 | ctgacatggc acagtatttt tgtttaaagt acctcctact tcaaaagtta agcgcaattt |
| 2761 | tgtgaagaca tgaaatcata agagtactta atgtaaaata aaagactgca tattaactct |
| 2821 | aaagaaaaat gccccacatt ttaaataaga aaataaagat caactctgct ctctcaggct |
| 2881 | ttttaaaaag ccattcatgt atgtgcttta ggtattttta tttctgcgag ttggatgtgg |
| 2941 | taagtgagga gtgctcagtt tttttttcct ccttcaaaag tctattgaaa gtgttggtga |
| 3001 | tgttaaatga ttgtgtgtta agatttgact gaaataactt agccacaaat cagcagtttc |
| 3061 | ccccaccctc attgccccct caccccaggc aagccccttt tatctgaatg tcagaagcag |
| 3121 | cctgcctcct agttatcatg tctgatgagg tctagctcag gaaggaattc catctattga |
| 3181 | tggaatatat cccctcaagt tcaatagatt cgaacacaga gagctttgtt taaaataatg |
| 3241 | cagcaaaaaa aaaaaaaaaa aaaaagcaaa aataaaagca tcagctgagg tgatattagt |
| 3301 | tcagtcacct aacaactcct agaagagatg aggaaaggga accttctgct gagctggctt |
| 3361 | ctggggcctg agcttccaga gctgtcccca agggctagga aggccgacct gaaggatgag |
| 3421 | aacctcaaat tcagttgctg gtgggagcca aggaagacgg cgggtgttct aacatggccc |
| 3481 | tttctggctg agctggcgga agtgggcgtt ttggccgatg ggatgtatct cggcgctgtg |
| 3541 | tctgtggccc agcaaaggtg cagggctgac tggctgagcc actgggttct acccgcaggc |
| 3601 | tccccactgc actgggcttt cacacagcca tgctcttggg tttccctccc ttgtaagcag |
| 3661 | agtcataata acacacgaat agtctaaggc tgggtattct ggtcagcaga ggtccttgag |
| 3721 | tcacagtgtt actgaaatgg ttctgagcct gagaatctct ttggcctctg aaagggcagg |
| 3781 | gcaggtgggc accgacttcc tgccagtcct ttcaggtttc ctgttcaaag ccagtcctgt |
| 3841 | tggtggaggg gatcaccgag agtgtctgta tcattttgta gcccttttct ctgacgtttt |
| 3901 | ctggtagaaa atgtcccttg tcaaaatgct aataattatc ataataatct gctttccaac |
| 3961 | caactcccac aagtgacaac ctgtgtagaa ctgtgataaa ggtttgcata atgtagggtt |
| 4021 | tgtaccaagt gtgtgtaagt ttctgttaaa taaaaagtct gtttccaatg ctcctat |

SEQ ID NO: 126 Human DPF3 Amino Acid Sequence Isoform 1 (NP_036206.3)

| | |
|---|---|
| 1 | matvihnplk algdqfykea iehcrsynsr lcaersvrlp fldsqtgvaq nncyiwmekr |
| 61 | hrgpglapgq lytyparcwr kkrrlhpped pklrlleikp evelplkkdg ftsesttlea |
| 121 | llrgegvekk vdareeesiq eiqrvlende nveegneeed leedipkrkn rtrgrargsa |
| 181 | ggrrrhdaas qedhdkpyvc dicgkryknr pglsyhyaht hlaseegdea qdqetrsppn |
| 241 | hrnenhrpqk gpdgtvipnn ycdfclggsn mnkksgrpee lvscadcgrs ahlggegrke |
| 301 | keaaaaartt edlfgstses dtstfhgfde ddleeprscr grrsgrgspt adkkgsc |

SEQ ID NO: 127 Human DPF3 cDNA Sequence Variant 2 (NM_001280542.1, CDS:
29-1165)

| | |
|---|---|
| 1 | agacaatatt ctgttacatt gtagcaaaat ggcgactgtc attcacaacc ccctgaaagc |
| 61 | gctcggggac cagttctaca aggaagccat tgagcactgc cggagttaca actcacggct |
| 121 | gtgtgcagag cgcagcgtgc gtcttccctt cctggactca cagactgggg tggcccagaa |
| 181 | caactgctac atctggatgg agaagaggca ccgaggccca ggccttgccc cgggccagct |
| 241 | gtatacatac cctgcccgct gctggcgcaa gaagagacga ttgcacccac ctgaagatcc |
| 301 | aaaactgcgg ctgctggaga taaaacctga agtggagctt cccctgaaga aggatgggtt |
| 361 | cacctcagag agcaccacgc tggaagcctt gctccgtggc gagggggttg agaagaaggt |
| 421 | ggatgccagg gaggaggaaa gcatccagga aatacagagg gttttggaaa atgatgaaaa |
| 481 | tgtagaagaa gggaatgaag aagaggattt ggaagaggat attcccaagc gaaagaacag |
| 541 | gactagagga cgggctcgcg gctctgcagg gggcaggagg aggcacgacg ccgcctctca |
| 601 | ggaagaccac gacaaacctt acgtctgtga catctgtggc aagcgctaca agaaccgacc |
| 661 | ggggctcagc taccactatg ctcacactca cctggccagc gaggaggggg atgaagctca |
| 721 | agaccaggag actcggtccc cacccaacca cagaaatgag aaccacaggc cccagaaagg |
| 781 | accggatgga acagtcattc ccaataacta ctgtgacttc tgcttggggg gctccaacat |
| 841 | gaacaagaag agtgggcggc ctgaagagct ggtgtcctgc gcagactgtg gacgctctgg |
| 901 | tcacccaacc tgcctgcagt ttaccctgaa catgaccgag gctgtcaaga cctacaagtg |
| 961 | gcagtgcata gagtgcaaat cctgtatcct ctgtgggacc tcagagaatg atgaccagct |
| 1021 | actcttctgc gatgactgtg accgaggcta tcacatgtac tgtttaaatc ccccggtggc |
| 1081 | tgagccccca gaaggaagct ggagctgcca cttatgctgg gaactgctca aagagaaagc |
| 1141 | ctcagccttt ggctgccagg cctagg |

SEQ ID NO: 128 Human DPF3 Amino Acid Sequence Isoform 2 (NP_001267471.1)

| | |
|---|---|
| 1 | matvihnplk algdqfykea iehcrsynsr lcaersvrlp fldsqtgvaq nncyiwmekr |
| 61 | hrgpglapgq lytyparcwr kkrrlhpped pklrlleikp evelplkkdg ftsesttlea |
| 121 | llrgegvekk vdareeesiq eiqrvlende nveegneeed leedipkrkn rtrgrargsa |
| 181 | ggrrrhdaas qedhdkpyvc dicgkryknr pglsyhyaht hlaseegdea qdqetrsppn |
| 241 | hrnenhrpqk gpdgtvipnn ycdfclggsn mnkksgrpee lvscadcgrs ghptclqftl |
| 301 | nmteavktyk wqciecksci lcgtsenddq llfcddcdrg yhmyclnppv aeppegswsc |
| 361 | hlcwellkek asafgcqa |

SEQ ID NO: 129 Human DPF3 cDNA Sequence Variant 3 (NM_001280543.1, CDS:
143-1246)

| | |
|---|---|
| 1 | agacaatatt ctgttacatt gtagcaaaat ggcgactgtc attcacaacc ccctgaaagc |
| 61 | gccctttcaa gaatcctatg aaagttgtgg atcatctccc cggaaaacac gcatatagat |
| 121 | gtgaacatct gcctatggtt ttatggggtt cacagacctg gaagagccca tctctggatg |
| 181 | ccctggaggc ccatgggctc tagggctcgg ggaccagttc tacaaggaag ccattgagca |
| 241 | ctgccggagt tacaactcac ggctgtgtgc agagcgcagc gtgcgtcttc ccttcctgga |
| 301 | ctcacagact ggggtggccc agaacaactg ctacatctgg atggagaaga ggcaccgagg |
| 361 | cccaggcctt gccccgggcc agctgtatac ataccctgcc cgctgctggc gcaagaagag |
| 421 | acgattgcac ccacctgaag atccaaaact gcggctgctg gagataaaac ctgaagtgga |
| 481 | gcttcccctg aagaaggatg ggttcacctc agagagcacc acgctggaag ccttgctccg |
| 541 | tggcgagggg gttgagaaga aggtggatgc cagggaggag gaaagcatcc aggaaataca |
| 601 | gagggttttg gaaaatgatg aaaatgtaga agaagggaat gaagaagagg atttggaaga |
| 661 | ggatattccc aagcgaaaga acaggactag aggacgggct cgcggctctg cagggggcag |
| 721 | gaggaggcac gacgccgcct ctcaggaaga ccacgacaaa ccttacgtct gtgacatctg |
| 781 | tggcaagcgc tacaagaacc gaccggggct cagctaccac tatgctcaca ctcacctggc |
| 841 | cagcgaggag ggggatgaag ctcaagacca ggagactcgg tccccaccca accacagaaa |
| 901 | tgagaaccac aggccccaga aaggaccgga tggaacagtc attcccaata actactgtga |
| 961 | cttctgcttg gggggctcca acatgaacaa gaagagtggg cggcctgaag agctggtgtc |
| 1021 | ctgcgcagac tgtggacgct ctgctcattt gggaggagaa ggcaggaagg agaaggaggc |
| 1081 | agcggccgca gcacgtacca cggaggactt attcggttcc acgtcagaaa gtgacacgtc |
| 1141 | aactttccac ggctttgatg aggacgattt ggaagagcct cgctcctgtc gaggacgccg |
| 1201 | cagtggccgg ggttcgccca cagcagataa aaagggcagt tgctaaaccc acggaacaga |
| 1261 | ctctctgggc aattagccat ccccctctga ctttggtcat tgtgctggtt ctgatatata |
| 1321 | ttttttttaa tgaaaggcaa ctttagattt tccctctatc cttgcttttt ttcccttcac |
| 1381 | ctcccacgtg tccctccatc cctcccccca cccctctgtt ttgggtatgt acaacagaag |
| 1441 | cacaaactac tgaaacaaaa caaaacagca gaatgagcgt tcttccgaga gatggcatcg |
| 1501 | tgatgcgcta tttattttcc atagaaatag gaagttagac ggattgtctc ttttctgagg |
| 1561 | ggagggggtc tttttgacag gagcagagtt gatgtcctca attttcatat ttattggcaa |
| 1621 | aaggaagaga agaggaactt tgggttggaa acaaagaacc aataacatta aaacattatt |
| 1681 | atttatatat tctagctgtt attagaatca gacttttttt gcgagagaga gagagagaga |
| 1741 | gagagaaggg aaatcaaaga aatcgaagca atatcctgtt tagaggcaag ccgcccggtg |
| 1801 | gggagaattt cctcaatggg agacggttgc actattctgt gccccacgga gtttgcggct |
| 1861 | ccccgcggca gacccctccc tcattctcct ccctgacctt tccatcttcc tctctgcttg |
| 1921 | cgagaaaatg tcagtagttc cagagaagtc ggggtgccta tgcctggcct ccctccacac |
| 1981 | ctgggccctg accagccgcc tcctgggctc ctcctcctcc gtcagtagag ctgctgtttt |
| 2041 | gttattgctg gtttttcctc actttcctcc tggcaaagaa cgacttccaa atgcagggat |
| 2101 | ggaatataag cagaacgtca tgggctcagc agtgactcca ccacccgagg ccgaggccgt |
| 2161 | gcttctggaa gatagaagga gacatcatcg tgtgtttccc ctccccttgc ccctgttaag |
| 2221 | aaacgtatca atacccattg gatgatcaag gctaccgtat ttcttctatt tttttttata |
| 2281 | gtgcctgcca ggcactttgt tttatgtttc caatagcact tcctgaaata aaccaaagca |
| 2341 | acactgctca aggcccctgg ggcgatggag aaggccaccc acctcactga cagtcccaag |
| 2401 | aatgaccggc tgcgaggtcc tagtcaaaag tcaacattat gacctgggga ctccagcatc |
| 2461 | cttcaagcaa gccatttccg aagaaggtga aaagaagcca ggatgattgg cacctcctcc |
| 2521 | tcctcctcct cttcttcctc ttcccttgcc cagccccctc ctgtgcgtgt gtttcagaca |
| 2581 | acacaggagc cagcacagga gtggaaaatc ctgcagcgca actcagctca gcccacagaa |
| 2641 | gccttgggaa tggcctcagt ttgtgcaata agaagatttt ttttttcttt ttaaatcttc |
| 2701 | attatatttt ctttgattgt ctgtgagaaa gtacccaggt ccgcctggaa ttactctaca |
| 2761 | gtagaaataa ctgaacacaa acaaactgat ggaaaaaaag agttaactat tttatttatt |
| 2821 | tcaatattta aaaggaaaaa agtgctgaca tggcacagta tttttgttta aagtacctcc |
| 2881 | tacttcaaaa gttaagcgca attttgtgaa gacatgaaat cataagagta cttaatgtaa |
| 2941 | aataaaagac tgcatattaa ctctaaagaa aaatgcccca cattttaaat aagaaaataa |
| 3001 | agatcaactc tgctctctca ggctttttaa aaagccattc atgtatgtgc tttaggtatt |
| 3061 | tttatttctg cgagttggat gtggtaagtg aggagtgctc agtttttttt tcctccttca |
| 3121 | aaagtctatt gaaagtgttg gtgatgttaa atgattgtgt gttaagattt gactgaaata |
| 3181 | acttagccac aaatcagcag tttcccccac cctcattgcc ccctcacccc aggcaagccc |
| 3241 | cttttatctg aatgtcagaa gcagcctgcc tcctagttat catgtctgat gaggtctagc |
| 3301 | tcaggaagga attccatcta ttgatggaat atatcccctc aagttcaata gattcgaaca |
| 3361 | cagagagctt tgtttaaaat aatgcagcaa aaaaaaaaaa aaaaaaaaag caaaaataaa |
| 3421 | agcatcagct gaggtgatat tagttcagtc acctaacaac tcctagaaga gatgaggaaa |
| 3481 | gggaaccttc tgctgagctg gcttctgggg cctgagcttc cagagctgtc cccaagggct |
| 3541 | aggaaggccg acctgaagga tgagaacctc aaattcagtt gctggtggga gccaaggaag |
| 3601 | acggcgggtg ttctaacatg gccctttctg gctgagctgg cggaagtggg cgttttggcc |
| 3661 | gatgggatgt atctcggcgc tgtgtctgtg gcccagcaaa ggtgcagggc tgactggctg |
| 3721 | agccactggg ttctacccgc aggctcccca ctgcactggg ctttcacaca gccatgctct |
| 3781 | tgggtttccc tcccttgtaa gcagagtcat aataacacac gaatagtcta aggctgggta |
| 3841 | ttctggtcag cagaggtcct tgagtcacag tgttactgaa atggttctga gcctgagaat |
| 3901 | ctctttggcc tctgaaaggg cagggcaggt gggcaccgac ttcctgccag tcctttcagg |
| 3961 | tttcctgttc aaagccagtc ctgttggtgg aggggatcac cgagagtgtc tgtatcattt |
| 4021 | tgtagccctt ttctctgacg ttttctggta gaaaatgtcc cttgtcaaaa tgctaataat |
| 4081 | tatcataata atctgctttc caaccaactc ccacaagtga caacctgtgt agaactgtga |
| 4141 | taaaggtttg cataatgtag ggtttgtacc aagtgtgtgt aagtttctgt taaataaaaa |
| 4201 | gtctgtttcc aatgctccta t |

SEQ ID NO: 130 Human DPF3 Amino Acid Sequence Isoform 3 (NP_001267472.1)

| | |
|---|---|
| 1 | mgftdleepi sgcpggpwal glgdqfykea iehcrsynsr lcaersvrlp fldsqtgvaq |
| 61 | nncyiwmekr hrgpglapgq lytyparcwr kkrrlhpped pklrlleikp evelplkkdg |
| 121 | ftsesttlea llrgegvekk vdareeesiq eiqrvlende nveegneeed leedipkrkn |
| 181 | rtrgrargsa ggrrrhdaas qedhdkpyvc dicgkryknr pglsyhyaht hlaseegdea |
| 241 | qdqetrsppn hrnenhrpqk gpdgtvipnn ycdfclggsn mnkksgrpee lvscadcgrs |
| 301 | ahlggegrke keaaaaartt edlfgstses dtstfhgfde ddleeprscr grrsgrgspt |
| 361 | adkkgsc |

SEQ ID NO: 131 Human DPF3 cDNA Sequence Variant 4 (NM_001280544.1, CDS:
307-1545)

| | |
|---|---|
| 1 | attctcgtct tcacccctgg ccactcctgg agttgaaaac caggttcgct cccggggacg |
| 61 | gtagggggtt cctaacgcaa aggaatgcac agggagaatc ggacgtgttt gcgccagctc |
| 121 | gtcgcccatc agaaataggg aaaggggtag gaaggcccca ggtttcaaat atatttatat |
| 181 | gaaagctgcc gttaagagga cgttggaagc tgaggctgat cagataggag ctcctggctt |
| 241 | cagttctggc tcggaagctc ggatacactg cgcttgaacg ccacagcgtt tcacccaaga |
| 301 | aagaaaatgt tttatggcag aataaatggg cgtaacttcg ccgcatcctc gctgccggtt |
| 361 | gctttcgctg caacaccgct gatgctgttt ctaccgaacc cacaactgat tttcagtttc |
| 421 | cccatttcca gccgaaatca cataaccggg ctgatgccac ctggtaaact caagttagag |
| 481 | aacctatttc acatgtgcac caggctcggg gaccagttct acaaggaagc cattgagcac |
| 541 | tgccggagtt acaactcacg gctgtgtgca gagcgcagcg tgcgtcttcc cttcctggac |
| 601 | tcacagactg gggtggccca gaacaactgc tacatctgga tggagaagag gcaccgaggc |
| 661 | ccaggccttg ccccgggcca gctgtataca taccctgccc gctgctggcg caagaagaga |
| 721 | cgattgcacc cacctgaaga tccaaaactg cggctgctgg agataaaacc tgaagtggag |
| 781 | cttcccctga agaaggatgg gttcacctca gagagcacca cgctggaagc cttgctccgt |
| 841 | ggcgaggggg ttgagaagaa ggtggatgcc agggaggagg aaagcatcca ggaaatacag |
| 901 | agggttttgg aaaatgatga aaatgtagaa gaagggaatg aagaagagga tttggaagag |
| 961 | gatattccca agcgaaagaa caggactaga ggacgggctc gcggctctgc agggggcagg |
| 1021 | aggaggcacg acgccgcctc tcaggaagac cacgacaaac cttacgtctg tgacatctgt |
| 1081 | ggcaagcgct acaagaaccg accggggctc agctaccact atgctcacac tcacctggcc |
| 1141 | agcgaggagg gggatgaagc tcaagaccag gagactcggt ccccacccaa ccacagaaat |
| 1201 | gagaaccaca ggccccagaa aggaccggat ggaacagtca ttcccaataa ctactgtgac |
| 1261 | ttctgcttgg ggggctccaa catgaacaag aagagtgggc ggcctgaaga gctggtgtcc |
| 1321 | tgcgcagact gtggacgctc tgctcatttg ggaggagaag gcaggaagga gaaggaggca |
| 1381 | gcggccgcag cacgtaccac ggaggactta ttcggttcca cgtcagaaag tgacacgtca |
| 1441 | actttccacg gctttgatga ggacgatttg gaagagcctc gctcctgtcg aggacgccgc |
| 1501 | agtggccggg gttcgcccac agcagataaa aagggcagtt gctaaaccca cggaacagac |
| 1561 | tctctgggca attagccatc cccctctgac tttggtcatt gtgctggttc tgatatatat |
| 1621 | tttttttaat gaaaggcaac tttagatttt ccctctatcc ttgctttttt tcccttcacc |
| 1681 | tcccacgtgt ccctccatcc ctccccccac ccctctgttt tgggtatgta caacagaagc |
| 1741 | acaaactact gaaacaaaac aaaacagcag aatgagcgtt cttccgagag atggcatcgt |
| 1801 | gatgcgctat ttattttcca tagaaatagg aagttagacg gattgtctct tttctgaggg |
| 1861 | gagggggtct ttttgacagg agcagagttg atgtcctcaa ttttcatatt tattggcaaa |
| 1921 | aggaagagaa gaggaacttt gggttggaaa caaagaacca ataacattaa aacattatta |
| 1981 | tttatatatt ctagctgtta ttagaatcag actttttttg cgagagagag agagagagag |
| 2041 | agagaaggga aatcaaagaa atcgaagcaa tatcctgttt agaggcaagc cgcccggtgg |
| 2101 | ggagaatttc ctcaatggga gacggttgca ctattctgtg ccccacggag tttgcggctc |
| 2161 | cccgcggcag acccctccct cattctcctc cctgaccttt ccatcttcct ctctgcttgc |
| 2221 | gagaaaatgt cagtagttcc agagaagtcg gggtgcctat gcctggcctc cctccacacc |
| 2281 | tgggccctga ccagccgcct cctgggctcc tcctcctccg tcagtagagc tgctgttttg |
| 2341 | ttattgctgg tttttcctca ctttcctcct ggcaaagaac gacttccaaa tgcagggatg |
| 2401 | gaatataagc agaacgtcat gggctcagca gtgactccac cacccgaggc cgaggccgtg |
| 2461 | cttctggaag atagaaggag acatcatcgt gtgtttcccc tccccttgcc cctgttaaga |
| 2521 | aacgtatcaa tacccattgg atgatcaagg ctaccgtatt tcttctattt ttttttatag |
| 2581 | tgcctgccag gcactttgtt ttatgtttcc aatagcactt cctgaaataa accaaagcaa |
| 2641 | cactgctcaa ggcccctggg gcgatggaga aggccaccca cctcactgac agtcccaaga |
| 2701 | atgaccggct gcgaggtcct agtcaaaagt caacattatg acctggggac tccagcatcc |
| 2761 | ttcaagcaag ccatttccga agaaggtgaa aagaagccag gatgattggc acctcctcct |
| 2821 | cctcctcctc ttcttcctct tcccttgccc agccccctcc tgtgcgtgtg tttcagacaa |
| 2881 | cacaggagcc agcacaggag tggaaaatcc tgcagcgcaa ctcagctcag cccacagaag |
| 2941 | ccttgggaat ggcctcagtt tgtgcaataa gaagattttt tttttctttt taaatcttca |
| 3001 | ttatattttc tttgattgtc tgtgagaaag tacccaggtc cgcctggaat tactctacag |
| 3061 | tagaaataac tgaacacaaa caaactgatg gaaaaaaaga gttaactatt ttatttattt |
| 3121 | caatatttaa aaggaaaaaa gtgctgacat ggcacagtat ttttgtttaa agtacctcct |
| 3181 | acttcaaaag ttaagcgcaa ttttgtgaag acatgaaatc ataagagtac ttaatgtaaa |
| 3241 | ataaaagact gcatattaac tctaaagaaa aatgccccac attttaaata agaaaataaa |
| 3301 | gatcaactct gctctctcag gctttttaaa aagccattca tgtatgtgct ttaggtattt |
| 3361 | ttatttctgc gagttggatg tggtaagtga ggagtgctca gttttttttt cctccttcaa |
| 3421 | aagtctattg aaagtgttgg tgatgttaaa tgattgtgtg ttaagatttg actgaaataa |
| 3481 | cttagccaca aatcagcagt ttcccccacc ctcattgccc cctcacccca ggcaagcccc |
| 3541 | ttttatctga atgtcagaag cagcctgcct cctagttatc atgtctgatg aggtctagct |
| 3601 | caggaaggaa ttccatctat tgatggaata tatcccctca agttcaatag attcgaacac |
| 3661 | agagagcttt gtttaaaata atgcagcaaa aaaaaaaaaa aaaaaaaagc aaaaataaaa |
| 3721 | gcatcagctg aggtgatatt agttcagtca cctaacaact cctagaagag atgaggaaag |
| 3781 | ggaaccttct gctgagctgg cttctggggc ctgagcttcc agagctgtcc ccaagggcta |
| 3841 | ggaaggccga cctgaaggat gagaacctca aattcagttg ctggtgggag ccaaggaaga |
| 3901 | cggcgggtgt tctaacatgg ccctttctgg ctgagctggc ggaagtgggc gttttggccg |
| 3961 | atgggatgta tctcggcgct gtgtctgtgg cccagcaaag gtgcagggct gactggctga |
| 4021 | gccactgggt tctacccgca ggctccccac tgcactgggc tttcacacag ccatgctctt |
| 4081 | gggtttccct cccttgtaag cagagtcata ataacacacg aatagtctaa ggctgggtat |
| 4141 | tctggtcagc agaggtcctt gagtcacagt gttactgaaa tggttctgag cctgagaatc |
| 4201 | tctttggcct ctgaaagggc agggcaggtg ggcaccgact tcctgccagt cctttcaggt |
| 4261 | ttcctgttca aagccagtcc tgttggtgga ggggatcacc gagagtgtct gtatcatttt |
| 4321 | gtagcccttt tctctgacgt tttctggtag aaaatgtccc ttgtcaaaat gctaataatt |
| 4381 | atcataataa tctgctttcc aaccaactcc cacaagtgac aacctgtgta gaactgtgat |
| 4441 | aaaggtttgc ataatgtagg gtttgtacca agtgtgtgta agtttctgtt aaataaaaag |
| 4501 | tctgtttcca atgctcctat |

SEQ ID NO: 132 Human DPF3 Amino Acid Sequence Isoform 4 (NP_001267473.1)

| | |
|---|---|
| 1 | mfygringrn faasslpvaf aatplmlflp npqlifsfpi ssrnhitglm ppgklklenl |
| 61 | fhmctrlgdq fykeaiehcr synsrlcaer svrlpfldsq tgvaqnncyi wmekrhrgpg |
| 121 | lapgqlytyp arcwrkkrrl hppedpklrl leikpevelp lkkdgftses ttleallrge |
| 181 | gvekkvdare eesiqeiqrv lendenveeg neeedleedi pkrknrtrgr argsaggrrr |
| 241 | hdaasqedhd kpyvcdicgk ryknrpglsy hyahthlase egdeaqdqet rsppnhrnen |
| 301 | hrpqkgpdgt vipnnycdfc lggsnmnkks grpeelvsca dcgrsahlgg egrkekeaaa |
| 361 | aarttedlfg stsesdtstf hgfdeddlee prscrgrrsg rgsptadkkg sc |

SEQ ID NO: 133 Mouse DPF3 cDNA Sequence Variant 1 (NM_001267625.1, CDS:
29-1165)

| | |
|---|---|
| 1 | agacaatatt ctgttacatt gtagcaaaat ggcgactgtc attcacaacc ccctgaaagc |
| 61 | gcttggggac cagttctaca aggaagccat tgagcactgc cggagctaca actcgaggct |
| 121 | gtgcgcagag cggagcgtgc gtctcccctt cctggactcg cagactgggg tggctcagaa |
| 181 | caactgctac atctggatgg agaagaggca ccgcggccca ggcctcgctc cgggccagtt |
| 241 | gtacacatac cctgcccgct gctggcgcaa gaagcgacga ttgcacccac cagaggaccc |
| 301 | aaaactacga ctcctggaaa tcaaacccga agtagaactg cccctgaaga aagatggatt |
| 361 | tacctctgag agtaccacac tggaagcctt gcttcgcggc gagggagtag agaagaaggt |
| 421 | ggatgccaga gaagaggaaa gcatccagga gatacagagg gttttggaaa atgatgaaaa |
| 481 | cgtagaagaa gggaatgaag aggaggattt ggaagaagat gttcccaagc gcaagaacag |
| 541 | gaccagagga cgggctcgcg gctctgcagg cggaaggagg aggcatgatg ccgcctctca |
| 601 | ggaagaccac gacaaaccct acgtctgcga catctgtggc aagcgctaca agaaccggcc |
| 661 | aggactcagc taccactacg ctcatactca cctggccagc gaggagggag acgaagccca |
| 721 | agaccaggag acccgatccc cacccaacca cagaaatgag aaccacagac cccagaaagg |
| 781 | accagacggg acagtcattc ctaataacta ctgtgacttc tgcttggggg gctccaacat |
| 841 | gaacaagaag agtgggaggc ctgaagagct ggtgtcctgt gcagactgtg gacgctctgg |
| 901 | tcatccaact tgcctgcagt tcactctgaa catgactgag gcagttaaga cctacaagtg |
| 961 | gcagtgcata gagtgtaaat cctgtatcct gtgtgggacc tcggagaacg acgaccagct |
| 1021 | actcttctgt gatgactgcg atcgtggcta tcacatgtac tgtttaaatc ccccagtggc |
| 1081 | tgagccccca gaaggaagct ggagctgcca tttatgctgg gagctgctca aagagaaagc |
| 1141 | atcagccttt ggctgccagg cctagggctc cacccaggtc acagagtgca gcccaccact |
| 1201 | agagaggctg aactgaagcc ctgttcaacc cagatggagg tctcctcctg tatatgcaca |
| 1261 | cagaccaact acaaggaaaa cgaatagtta cagaagggaa cggagggagc aaggtctcca |
| 1321 | ctcacttctc gccctaccca tgacctccca ccccacacat ccttcagcca gctcttcctc |
| 1381 | atttctacca gcgggaactt ggcacttttg aagaataatc cagccccggc tctgtggaaa |
| 1441 | cttcctcatg ttcactgtca caggcatctc tctttgttgc ttcttgtttt ggaggaagcc |
| 1501 | attttgtgac tgctcatcaa ccactcgtgt gttgcttggt ggggttcttg ttttgttgtc |
| 1561 | tattgtgttt caagaacttg tcacagagtg tcctcaccct tagcttaggc tcttcatcct |
| 1621 | gaaactcaca gaggaacaaa atgccgtggt ggggaagctc ctgcctatta cgagtctcac |
| 1681 | tggaagcatc catgtttgga ggccatcttg aagacagaac ttggaaaatg tcttggtttt |
| 1741 | cttagtctct gctgagaaga gaagttgtag catttgagcc ttggcagtag catccccagc |
| 1801 | tgcgatgacc ttgatccact gcactgccat ttgatcaggg gttcagaggg cctgggagat |
| 1861 | gggaggaaca cttggggccc tgctatagcc agccagtatt tgctgttcct caggagggac |
| 1921 | taggtggttc cttgaccttc agaactgtgg tgtccttgag gtgagacaac acagtctcta |
| 1981 | aacacagaaa agtgctgaag atcctgcccc caaccgaatt gaccgtgaag gtctggctca |
| 2041 | gtctctgggg ggtgggactc aagctctgga gaggtgggca aaggatgccc attcaacagt |
| 2101 | ccagggttgg ttagaagaga ctgtatgtag ctttgagaaa ctctcccagt attgatgcta |
| 2161 | cactatggat ttcttttctg ggcaatttct tccttccatg tagtatatgt ttgccaatga |
| 2221 | ccactgagat gtgactggaa attttagaat ggtgaagaga tgaacattac ttaaccagat |
| 2281 | cattgggcac agtgattact tgtgactggg tggcaatgat tcagagccct tgtccgttct |
| 2341 | tgcaccctaa gctcccccat atggaatggg ctctcgtttg aagcaaggtt tctagaagat |
| 2401 | gtaggaaggt ctagattctg agaactcttg tgtgtcagaa gagaagcctt gagggctgga |
| 2461 | gtgggctggg ctgcctttga cgcacggcac cagcatgata actgacacat ttctggaaaa |
| 2521 | atcgtttgcc caaagggcag gtctccgtga gcaggaccct cgcgcatgct cggcttccct |
| 2581 | ggattcagct ccatcgctgt ggtccagcag cttgcaacaa aggcctgggt tatttttagt |
| 2641 | cgtcagctcc tgaagaagcc cctggagacc tgggctggct gggcccctct gcccagcggc |
| 2701 | agcatggcct ctgccactcc acaggagtca tcctccccct ggctaattgc tcttggcacg |
| 2761 | tggacccagg gcagcctggc atggaaccaa gcagtgtgac cccccctgca acttctttgc |
| 2821 | agagtgacct gtggcaagag agtgggggtc actttcctgc aggccctgtg gcctcagagc |
| 2881 | tagttccatg catacgaaat gatctcattt aaagggcccc tgtccagaga gcatctgtct |
| 2941 | cctcctctca agctctcttc ttcctcctgc tggttgctgt gcctgtgtgg attcaaaaga |
| 3001 | cccaagggag ggctggagga atggcccgtc tccacggagg ggtacattcc ctctccagac |
| 3061 | tctgcgggct ctctcgttcc acaaaaccca aagcagagta tcttcagaga ctaactactt |
| 3121 | gtttggggga tcatattaaa ttaatttcag aaggg |

SEQ ID NO: 134 Mouse DPF3 Amino Acid Sequence Isoform 1 (NP_001254554.1)

| | |
|---|---|
| 1 | matvihnplk algdqfykea iehcrsynsr lcaersvrlp fldsqtgvaq nncyiwmekr |
| 61 | hrgpglapgq lytyparcwr kkrrlhpped pklrlleikp evelplkkdg ftsesttlea |
| 121 | llrgegvekk vdareeesiq eiqrvlende nveegneeed leedvpkrkn rtrgrargsa |
| 181 | ggrrrhdaas qedhdkpyvc dicgkryknr pglsyhyaht hlaseegdea qdqetrsppn |
| 241 | hrnenhrpqk gpdgtvipnn ycdfclggsn mnkksgrpee lvscadcgrs ghptclqftl |
| 301 | nmteavktyk wqciecksci lcgtsenddq llfcddcdrg yhmycinppv aeppegswsc |
| 361 | hlcwellkek asafgcqa |

SEQ ID NO: 135 Mouse DPF3 cDNA Sequence Variant 2 (NM_001267626.1, CDS:
29-1102)

| | |
|---|---|
| 1 | agacaatatt ctgttacatt gtagcaaaat ggcgactgtc attcacaacc ccctgaaagc |
| 61 | gcttggggac cagttctaca aggaagccat tgagcactgc cggagctaca actcgaggct |
| 121 | gtgcgcagag cggagcgtgc gtctcccctt cctggactcg cagactgggg tggctcagaa |
| 181 | caactgctac atctggatgg agaagaggca ccgcggccca ggcctcgctc cgggccagtt |
| 241 | gtacacatac cctgcccgct gctggcgcaa gaagcgacga ttgcacccac cagaggaccc |
| 301 | aaaactacga ctcctggaaa tcaaacccga agtagaactg cccctgaaga aagatggatt |
| 361 | tacctctgag agtaccacac tggaagcctt gcttcgcggc gagggagtag agaagaaggt |
| 421 | ggatgccaga gaagaggaaa gcatccagga gatacagagg gttttggaaa atgatgaaaa |
| 481 | cgtagaagaa gggaatgaag aggaggattt ggaagaagat gttcccaagc gcaagaacag |
| 541 | gaccagagga cgggctcgcg gctctgcagg cggaaggagg aggcatgatg ccgcctctca |
| 601 | ggaagaccac gacaaaccct acgtctgcga catctgtggc aagcgctaca agaaccggcc |
| 661 | aggactcagc taccactacg ctcatactca cctggccagc gaggagggag acgaagccca |
| 721 | agaccaggag acccgatccc cacccaacca cagaaatgag aaccacagac cccagaaagg |
| 781 | accagacggg acagtcattc ctaataacta ctgtgacttc tgcttggggg gctccaacat |
| 841 | gaacaagaag agtgggaggc ctgaagagct ggtgtcctgt gcagactgtg gacgctctgc |
| 901 | tcatttggga ggagaaggca ggaaggagaa ggaggcagcg gccgcagcac gtaccacgga |
| 961 | ggacttattc ggttccacgt cagaaagtga cacctcaact ttctacggct ttgatgagga |
| 1021 | cgatttggaa gagcctcgct cctgtcgagg acgccgcagt ggccggggtt cacccacagc |
| 1081 | agataaaaag ggcagctgct gagcacatgg gacagactgt gtggccaatt agccacccct |
| 1141 | ccccctgact ctggtcattg ttctagttct gatatatatt tttaaatgaa agacaacttg |
| 1201 | ggcatttccc ttaatccttg ccttttcctt ctgcctccca cgtgtccctc cctctcctag |
| 1261 | cttccttcta ttttgggtac aacagaagca cacactactg agaaccaggg aagagcagga |
| 1321 | tgagagtcct ctggggagcc atggcatcat ggcgggctct tatggactct tatccctaga |
| 1381 | agtaggagaa attaagagga ttttctgtca ctgggggagg gcatcttttt gatgtgagca |
| 1441 | gagttgattt cctgttttca agagaagagg aacatgaggt ttgaaaacaa ataacattaa |
| 1501 | caatatttat ttataaaaaa aaaaaaaaaa aa |

SEQ ID NO: 136 Mouse DPF3 Amino Acid Sequence Isoform 2 (NP_001254555.1)

| | |
|---|---|
| 1 | matvihnplk algdqfykea iehcrsynsr lcaersvrlp fldsqtgvaq nncyiwmekr |
| 61 | hrgpglapgq lytyparcwr kkrrlhpped pklrlleikp evelplkkdg ftsesttlea |
| 121 | llrgegvekk vdareeesiq eiqrvlende nveegneeed leedvpkrkn rtrgrargsa |
| 181 | ggrrrhdaas qedhdkpyvc dicgkryknr pglsyhyaht hlaseegdea qdqetrsppn |
| 241 | hrnenhrpqk gpdgtvipnn ycdfclggsn mnkksgrpee lvscadcgrs ahlggegrke |
| 301 | keaaaaartt edlfgstses dtstfygfde ddleeprscr grrsgrgspt adkkgsc |

SEQ ID NO: 137 Mouse DPF3 cDNA Sequence Variant 3 (NM_058212.2, CDS: 29-
1099)

| | |
|---|---|
| 1 | agacaatatt ctgttacatt gtagcaaaat ggcgactgtc attcacaacc ccctgaaagc |
| 61 | gcttggggac cagttctaca aggaagccat tgagcactgc cggagctaca actcgaggct |
| 121 | gtgcgcagag cggagcgtgc gtctcccctt cctggactcg cagactgggg tggctcagaa |
| 181 | caactgctac atctggatgg agaagaggca ccgcggccca ggcctcgctc cgggccagtt |
| 241 | gtacacatac cctgcccgct gctggcgcaa gaagcgacga ttgcacccac cagaggaccc |
| 301 | aaaactacga ctcctggaaa tcaaacccgt agaactgccc ctgaagaaag atggatttac |
| 361 | ctctgagagt accacactgg aagccttgct tcgcggcgag ggagtagaga agaaggtgga |
| 421 | tgccagagaa gaggaaagca tccaggagat acagagggtt ttggaaaatg atgaaaacgt |
| 481 | agaagaaggg aatgaagagg aggatttgga agaagatgtt cccaagcgca agaacaggac |
| 541 | cagaggacgg gctcgcggct ctgcaggcgg aaggaggagg catgatgccg cctctcagga |
| 601 | agaccacgac aaaccctacg tctgcgacat ctgtggcaag cgctacaaga accggccagg |
| 661 | actcagctac cactacgctc atactcacct ggccagcgag gagggagacg aagcccaaga |
| 721 | ccaggagacc cgatccccac ccaaccacag aaatgagaac cacagacccc agaaaggacc |
| 781 | agacgggaca gtcattccta ataactactg tgacttctgc ttggggggct ccaacatgaa |
| 841 | caagaagagt gggaggcctg aagagctggt gtcctgtgca gactgtggac gctctgctca |
| 901 | tttgggagga gaaggcagga aggagaagga ggcagcggcc gcagcacgta ccacggagga |
| 961 | cttattcggt tccacgtcag aaagtgacac ctcaactttc tacggctttg atgaggacga |
| 1021 | tttggaagag cctcgctcct gtcgaggacg ccgcagtggc cggggttcac ccacagcaga |
| 1081 | taaaaagggc agctgctgag cacatgggac agactgtgtg gccaattagc cacccctccc |
| 1141 | cctgactctg gtcattgttc tagttctgat atatattttt aaatgaaaga caacttgggc |
| 1201 | atttccctta atccttgcct tttccttctg cctcccacgt gtccctccct ctcctagctt |
| 1261 | ccttctattt tgggtacaac agaagcacac actactgaga accagggaag agcaggatga |
| 1321 | gagtcctctg gggagccatg gcatcatggc gggctcttat ggactcttat ccctagaagt |
| 1381 | aggagaaatt aagaggattt tctgtcactg ggggagggca tctttttgat gtgagcagag |
| 1441 | ttgatttcct gttttcaaga gaagaggaac atgaggtttg aaaacaaata acattaacaa |
| 1501 | tatttattta taaaaaaaaa aaaaaaaaa |

SEQ ID NO: 138 Mouse DPF3 Amino Acid Sequence Isoform 3 (NP_478119.1)

| | |
|---|---|
| 1 | matvihnplk algdqfykea iehcrsynsr lcaersvrlp fldsqtgvaq nncyiwmekr |
| 61 | hrgpglapgq lytyparcwr kkrrlhpped pklrlleikp velplkkdgf tsesttleal |
| 121 | lrgegvekkv dareeesiqe iqrvlenden veegneeedl eedvpkrknr trgrargsag |
| 181 | grrrhdaasq edhdkpyvcd icgkryknrp glsyhyahth laseegdeaq dqetrsppnh |
| 241 | rnenhrpqkg pdgtvipnny cdfclggsnm nkksgrpeel vscadcgrsa hlggegrkek |
| 301 | eaaaaartte dlfgstsesd tstfygfded dleeprscrg rrsgrgspta dkkgsc |

SEQ ID NO: 139 Human ACTL6A cDNA Sequence variant 1 (NM_0044301.4, CDS:
214-1503)

| | |
|---|---|
| 1 | agacttaggc ctggacccta gtgattggct gataggagga gccagcaagt gtggctgagc |
| 61 | tccggggtgt gtggacgccg ctttgttgcc tgaggtgggt ggcggtggaa gttaagggag |
| 121 | tcaggggcta tcgctcctcg agactcgcag tcgcggccac tgcagtcact tcgccagtta |
| 181 | gcccttaggg taggagtcgc gccggcagca gccatgagcg gcggcgtgta cgggggagat |
| 241 | gaagttggag cccttgtttt tgacattgga tcctatactg tgagagctgg ttatgctggt |
| 301 | gaggactgcc ccaaggtgga ttttcctaca gctattggta tggtggtaga aagagatgac |
| 361 | ggaagcacat taatggaaat agatggcgat aaaggcaaac aaggcggtcc cacctactac |
| 421 | atagatacta atgctctgcg tgttccgagg gagaatatgg aggccatttc acctctaaaa |
| 481 | aatgggatgg ttgaagactg ggatagtttc caagctattt tggatcatac ctacaaaatg |
| 541 | catgtcaaat cagaagccag tctccatcct gttctcatgt cagaggcacc gtggaatact |
| 601 | agagcaaaga gagagaaact gacagagtta atgtttgaac actacaacat ccctgccttc |
| 661 | ttcctttgca aaactgcagt tttgacagca tttgctaatg gtcgttctac tgggctgatt |
| 721 | ttggacagtg gagccactca taccactgca attccagtcc acgatggcta tgtccttcaa |
| 781 | caaggcattg tgaaatcccc tcttgctgga gactttatta ctatgcagtg cagagaactc |
| 841 | ttccaagaaa tgaatattga attggttcct ccatatatga ttgcatcaaa agaagctgtt |
| 901 | cgtgaaggat ctccagcaaa ctggaaaaga aaagagaagt tgcctcaggt tacgaggtct |
| 961 | tggcacaatt atatgtgtaa ttgtgttatc caggattttc aagcttcggt acttcaagtg |
| 1021 | tcagattcaa cttatgatga acaagtggct gcacagatgc caactgttca ttatgaattc |
| 1081 | cccaatggct acaattgtga ttttggtgca gagcggctaa agattccaga aggattattt |
| 1141 | gacccttcca atgtaaaggg gttatcagga aacacaatgt taggagtcag tcatgttgtc |
| 1201 | accacaagtg ttgggatgtg tgatattgac atcagaccag gtctctatgg cagtgtaata |
| 1261 | gtggcaggag gaaacacact aatacagagt tttactgaca ggttgaatag agagctgtct |
| 1321 | cagaaaactc ctccaagtat gcggttgaaa ttgattgcaa ataatacaac agtggaacgg |
| 1381 | aggtttagct catggattgg cggctccatt ctagcctctt tgggtacctt tcaacagatg |
| 1441 | tggatttcca agcaagaata tgaagaagga gggaagcagt gtgtagaaag aaaatgccct |
| 1501 | tgagaaagag ttcccaagct tctaccttcc ttttgtcacc ttacgtttca tagctttagt |
| 1561 | atactcagga aaagaatgac catcttttgt agaatgttta tacatttttg catatttcaa |
| 1621 | tttccactta aattttttaa agctttaact ggctctataa attaagtttg tgctttcctt |
| 1681 | gaaatgcact tattcttatt acaagcattt tataattttg tataaatgtc tattttctct |
| 1741 | aaatattttg ctttcagtaa aatgctttcc aactctgttt agtgtattaa ttaccagtgg |
| 1801 | attggtagaa ctgcttttta ttgactagta aaagttactg cctatgcttt ttaccttagg |
| 1861 | cttacagaat taaataaaaa ttagccattc cagaaataaa aaaaaaaaaa aaaaaaaaaa |
| 1921 | aaaaaaaaaa aa |

SEQ ID NO: 140 Human ACTL6A Amino Acid Sequence isoform 1 (NP_004292.1)

| | |
|---|---|
| 1 | msggvyggde vgalvfdigs ytvragyage dcpkvdfpta igmvverddg stlmeidgdk |
| 61 | gkqggptyyi dtnalrvpre nmeaisplkn gmvedwdsfq aildhtykmh vkseaslhpv |
| 121 | lmseapwntr akrekltelm fehynipaff lcktavltaf angrstglil dsgathttai |
| 181 | pvhdgyvlqq givksplagd fitmqcrelf qemnielvpp ymiaskeavr egspanwkrk |
| 241 | eklpqvtrsw hnymcncviq dfqasvlqvs dstydeqvaa qmptvhyefp ngyncdfgae |
| 301 | rlkipeglfd psnvkglsgn tmlgvshvvt tsvgmcdidi rpglygsviv aggntliqsf |
| 361 | tdrinrelsq ktppsmrlkl iannttverr fsswiggsil aslgtfqqmw iskqeyeegg |
| 421 | kqcverkcp |

SEQ ID NO: 141 Human ACTL6A cDNA Sequence variant 2 (NM_177989.3; CDS:
196-1359)

| | |
|---|---|
| 1 | agacttaggc ctggacccta gtgattggct gataggagga gccagcaagt gtggctgagc |
| 61 | tccggggtgt gtggacgccg ctttgttgcc tgagatgaag ttggagccct tgtttttgac |
| 121 | attggatcct atactgtgag agctggttat gctggtgagg actgccccaa ggtggatttt |
| 181 | cctacagcta ttggtatggt ggtagaaaga gatgacggaa gcacattaat ggaaatagat |
| 241 | ggcgataaag gcaaacaagg cggtcccacc tactacatag atactaatgc tctgcgtgtt |
| 301 | ccgagggaga atatggaggc catttcacct ctaaaaaatg ggatggttga agactgggat |
| 361 | agtttccaag ctattttgga tcatacctac aaaatgcatg tcaaatcaga agccagtctc |
| 421 | catcctgttc tcatgtcaga ggcaccgtgg aatactagag caaagagaga gaaactgaca |
| 481 | gagttaatgt ttgaacacta caacatccct gccttcttcc tttgcaaaac tgcagttttg |
| 541 | acagcatttg ctaatggtcg ttctactggg ctgattttgg acagtggagc cactcatacc |
| 601 | actgcaattc cagtccacga tggctatgtc cttcaacaag gcattgtgaa atcccctctt |
| 661 | gctggagact ttattactat gcagtgcaga gaactcttcc aagaaatgaa tattgaattg |
| 721 | gttcctccat atatgattgc atcaaaagaa gctgttcgtg aaggatctcc agcaaactgg |
| 781 | aaaagaaaag agaagttgcc tcaggttacg aggtcttggc acaattatat gtgtaattgt |
| 841 | gttatccagg attttcaagc ttcggtactt caagtgtcag attcaactta tgatgaacaa |
| 901 | gtggctgcac agatgccaac tgttcattat gaattcccca atggctacaa ttgtgatttt |
| 961 | ggtgcagagc ggctaaagat tccagaagga ttatttgacc cttccaatgt aaaggggtta |
| 1021 | tcaggaaaca caatgttagg agtcagtcat gttgtcacca caagtgttgg gatgtgtgat |
| 1081 | attgacatca gaccaggtct ctatggcagt gtaatagtgg caggaggaaa cacactaata |
| 1141 | cagagtttta ctgacaggtt gaatagagag ctgtctcaga aaactcctcc aagtatgcgg |
| 1201 | ttgaaattga ttgcaaataa tacaacagtg gaacggaggt ttagctcatg gattggcggc |
| 1261 | tccattctag cctctttggg tacctttcaa cagatgtgga tttccaagca agaatatgaa |
| 1321 | gaaggaggga agcagtgtgt agaaagaaaa tgcccttgag aaagagttcc caagcttcta |
| 1381 | ccttcctttt gtcaccttac gtttcatagc tttagtatac tcaggaaaag aatgaccatc |
| 1441 | ttttgtagaa tgtttataca tttttgcata tttcaatttc cacttaaatt ttttaaagct |
| 1501 | ttaactggct ctataaatta agtttgtgct ttccttgaaa tgcacttatt cttattacaa |
| 1561 | gcattttata attttgtata aatgtctatt ttctctaaat attttgcttt cagtaaaatg |
| 1621 | ctttccaact ctgtttagtg tattaattac cagtggattg gtagaactgc tttttattga |
| 1681 | ctagtaaaag ttactgccta tgctttttac cttaggctta cagaattaaa taaaaattag |
| 1741 | ccattccaga aataaaaaaa aaaaaaaaaa aaaaaaaaaa aaaaaaaa |

SEQ ID NO: 142 Human ACTL6A cDNA Sequence variant 3 (NM_178042.3; CDS:
388-1551)

| | |
|---|---|
| 1 | agacttaggc ctggacccta gtgattggct gataggagga gccagcaagt gtggctgagc |
| 61 | tccggggtgt gtggacgccg ctttgttgcc tgaggtgggt ggcggtggaa gttaagggag |
| 121 | tcaggggcta tcgctcctcg agactcgcag tcgcggccac tgcagtcact tcgccagtta |
| 181 | gcccttaggg taggagtcgc gccggcagca gccatgagcg gcggcgtgta cgggggaggt |
| 241 | gagtgagtgc ggccggacga gagagcgcgc cttttcggcg tgtgggatga agttggagcc |
| 301 | cttgtttttg acattggatc ctatactgtg agagctggtt atgctggtga ggactgcccc |
| 361 | aaggtggatt ttcctacagc tattggtatg gtggtagaaa gagatgacgg aagcacatta |
| 421 | atggaaatag atggcgataa aggcaaacaa ggcggtccca cctactacat agatactaat |
| 481 | gctctgcgtg ttccgaggga gaatatggag gccatttcac ctctaaaaaa tgggatggtt |
| 541 | gaagactggg atagtttcca agctattttg gatcatacct acaaaatgca tgtcaaatca |
| 601 | gaagccagtc tccatcctgt tctcatgtca gaggcaccgt ggaatactag agcaaagaga |
| 661 | gagaaactga cagagttaat gtttgaacac tacaacatcc ctgccttctt cctttgcaaa |
| 721 | actgcagttt tgacagcatt tgctaatggt cgttctactg ggctgatttt ggacagtgga |
| 781 | gccactcata ccactgcaat tccagtccac gatggctatg tccttcaaca aggcattgtg |
| 841 | aaatcccctc ttgctggaga ctttattact atgcagtgca gagaactctt ccaagaaatg |
| 901 | aatattgaat tggttcctcc atatatgatt gcatcaaaag aagctgttcg tgaaggatct |
| 961 | ccagcaaact ggaaaagaaa agagaagttg cctcaggtta cgaggtcttg gcacaattat |
| 1021 | atgtgtaatt gtgttatcca ggattttcaa gcttcggtac ttcaagtgtc agattcaact |
| 1081 | tatgatgaac aagtggctgc acagatgcca actgttcatt atgaattccc caatggctac |
| 1141 | aattgtgatt ttggtgcaga gcggctaaag attccagaag gattatttga cccttccaat |
| 1201 | gtaaaggggt tatcaggaaa cacaatgtta ggagtcagtc atgttgtcac cacaagtgtt |
| 1261 | gggatgtgtg atattgacat cagaccaggt ctctatggca gtgtaatagt ggcaggagga |
| 1321 | aacacactaa tacagagttt tactgacagg ttgaatagag agctgtctca gaaaactcct |
| 1381 | ccaagtatgc ggttgaaatt gattgcaaat aatacaacag tggaacggag gtttagctca |
| 1441 | tggattggcg gctccattct agcctctttg ggtacctttc aacagatgtg gatttccaag |
| 1501 | caagaatatg aagaaggagg gaagcagtgt gtagaaagaa aatgcccttg agaaagagtt |
| 1561 | cccaagcttc taccttcctt ttgtcacctt acgtttcata gctttagtat actcaggaaa |
| 1621 | agaatgacca tcttttgtag aatgtttata catttttgca tatttcaatt tccacttaaa |
| 1681 | ttttttaaag ctttaactgg ctctataaat taagtttgtg ctttccttga aatgcactta |
| 1741 | ttcttattac aagcatttta taattttgta taaatgtcta ttttctctaa atattttgct |
| 1801 | ttcagtaaaa tgctttccaa ctctgtttag tgtattaatt accagtggat tggtagaact |
| 1861 | gctttttatt gactagtaaa agttactgcc tatgcttttt accttaggct tacagaatta |
| 1921 | aataaaaatt agccattcca gaaataaaaa aaaaaaaaaa aaaaaaaaaa aaaaaaaaaa |

SEQ ID NO: 143 Human ACTL6A Amino Acid Sequence isoform 2 (NP_817126.1
and NP_829888.1)

| | |
|---|---|
| 1 | mvverddgst lmeidgdkgk qggptyyidt nalrvprenm eaisplkngm vedwdsfqai |
| 61 | ldhtykmhvk seaslhpvlm seapwntrak rekltelmfe hynipafflc ktavltafan |
| 121 | grstglilds gathttaipv hdgyvlqqgi vksplagdfi tmqcrelfqe mnielvppym |
| 181 | iaskeavreg spanwkrkek lpqvtrswhn ymcncviqdf qasvlqvsds tydeqvaaqm |
| 241 | ptvhyefpng yncdfgaerl kipeglfdps nvkglsgntm lgvshvvtts vgmcdidirp |
| 301 | glygsvivag gntliqsftd rlnrelsqkt ppsmrlklia nnttverrfs swiggsilas |
| 361 | lgtfqqmwis kqeyeeggkq cverkcp |

SEQ ID NO: 144 Mouse ACTL6A cDNA Sequence (NM_019673.2; CDS: 311-1600)

| | |
|---|---|
| 1 | cttcttctgt cgcttctccc tctccctgcc cctacggatg ccttccattg gctaagacgg |
| 61 | ctaaaccgcg cggggatgca gcagcgccac actctgattg gctaatgact aagccggacc |
| 121 | ctttgtcatt ggttgatacg agaaaccagc aagagtggct gtgcagcggg cgtgcggccg |
| 181 | ctgctttgtt gccggagggg gcggcgttgg aagttgcagg cttgcggggc cggcgttctc |
| 241 | agggagagga gtcacgccgc tgttatcttt cgtccggtag tcttcggcca gtccccgcca |
| 301 | gacagtagcc atgagcggcg gcgtgtacgg cggagatgaa gttggcgctc ttgtttttga |
| 361 | cattggatcg tacacagtga gggctggcta tgctggcgag gactgcccta aggttgattt |
| 421 | ccccacggct atcggtgtgg tgctggagag agatgacgga agtacaatga tggagattga |
| 481 | tggtgacaaa ggcaagcagg gcgggcccac ctactacata gacaccaatg ccctccgcgt |
| 541 | gcccagggag aacatggagg ccatctcacc actcaagaat ggcatggttg aagactggga |
| 601 | tagtttccag gccattttgg atcatacata caagatgcat gtcaaatccg aagccagcct |
| 661 | gcatcctgtt ctcatgtcgg aagcaccgtg gaacaccagg gcgaagagag agaaactgac |
| 721 | agagttgatg tttgagcact acagcatccc tgcattcttc ctttgcaaaa ctgcagtttt |
| 781 | gacggcattt gctaatggtc gttctactgg gctgattttg gacagtggag ctacccacac |
| 841 | cactgcgatt ccagtccacg atggctatgt tcttcaacaa ggcattgtga aatcccctct |
| 901 | ggctggagac ttcattacca tgcagtgcag agaactcttc caggaaatga acatagaact |
| 961 | cattcctcct tacatgattg catcaaaaga ggctgttcga gaaggttctc cagccaactg |
| 1021 | gaaaagaaaa gagaaactgc cccaggttac aaggtcttgg cacaattaca tgtgcaactg |
| 1081 | cgtcatccag gattttcaag cttccgttct tcaggtgtca gactccacct acgacgaaca |
| 1141 | agtggctgca cagatgccaa ccgtccacta cgaattcccc aatggctaca actgtgattt |
| 1201 | tggggcagag cggctgaaaa ttcctgaagg gttatttgac ccttccaacg taaagggact |
| 1261 | gtctgggaac acgatgctgg gagtcagtca cgttgtcaca accagcgtcg gaatgtgtga |
| 1321 | catcgacatc agaccaggtc tctacggcag tgtgatcgta gcaggaggaa acacgctaat |
| 1381 | acagagtttc actgacaggt taaatagaga gctttctcag aaaactccac caagtatgcg |
| 1441 | gttgaaactg attgcaaaca acacgacggt ggagcggagg ttcagctcat ggattggtgg |
| 1501 | ctctatccta gcatctttgg gtacctttca acagatgtgg atttctaaac aggaatatga |
| 1561 | agaaggaggg aagcagtgtg tagaaagaaa atgcccttga gggctccacc ctgcctgccc |
| 1621 | gtcacctcaa cgtctgtagc tttagtacac tcaggaaaag atgaccatct tttgtagaat |
| 1681 | gtttatacat gtttgcatat ttcaatttcc acttaaattt tttaaggctt taactggctc |
| 1741 | tataaattaa atgagtttgt gctttccttg aaatgcactt attcttatta caggcatttt |
| 1801 | ataattttgt atgaatgtct attttctcta aatattttgc tttcagtaag tactctccag |
| 1861 | ctctcctggg ggttggttgg tggaattact ctgtattgac aagtacaagt tactgcctat |
| 1921 | gctttgtacc ttaggctaca aaactaaata aaaatcacta ctgtcctag |

SEQ ID NO: 145 Mouse ACTL6A Amino Acid Sequence (NP_062647.2)

| | |
|---|---|
| 1 | msggvyggde vgalvfdigs ytvragyage dcpkvdfpta igvvlerddg stmmeidgdk |
| 61 | gkqggptyyi dtnalrvpre nmeaisplkn gmvedwdsfq aildhtykmh vkseaslhpv |
| 121 | lmseapwntr akrekltelm fehysipaff lcktavltaf angrstglil dsgathttai |
| 181 | pvhdgyvlqq givksplagd fitmqcrelf qemnielipp ymiaskeavr egspanwkrk |
| 241 | eklpqvtrsw hnymcncviq dfqasvlqvs dstydeqvaa qmptvhyefp ngyncdfgae |
| 301 | rlkipeglfd psnvkglsgn tmlgvshvvt tsvgmcdidi rpglygsviv aggntliqsf |
| 361 | tdrinrelsq ktppsmrlkl iannttverr fsswiggsil aslgtfqqmw iskqeyeegg |
| 421 | kqcverkcp |

SEQ ID NO: 146 Human β-Actin cDNA Sequence (NM_001101.4; CDS: 193-1320)

| | |
|---|---|
| 1 | gagtgagcgg cgcggggcca atcagcgtgc gccgttccga aagttgcctt ttatggctcg |
| 61 | agcggccgcg gcggcgccct ataaaaccca gcggcgcgac gcgccaccac cgccgagacc |
| 121 | gcgtccgccc cgcgagcaca gagcctcgcc tttgccgatc cgccgcccgt ccacacccgc |
| 181 | cgccagctca ccatggatga tgatatcgcc gcgctcgtcg tcgacaacgg ctccggcatg |
| 241 | tgcaaggccg gcttcgcggg cgacgatgcc ccccgggccg tcttcccctc catcgtgggg |
| 301 | cgccccaggc accagggcgt gatggtgggc atgggtcaga aggattccta tgtgggcgac |
| 361 | gaggcccaga gcaagagagg catcctcacc ctgaagtacc ccatcgagca cggcatcgtc |
| 421 | accaactggg acgacatgga gaaaatctgg caccacacct tctacaatga gctgcgtgtg |
| 481 | gctcccgagg agcaccccgt gctgctgacc gaggcccccc tgaaccccaa ggccaaccgc |
| 541 | gagaagatga cccagatcat gtttgagacc ttcaacaccc cagccatgta cgttgctatc |
| 601 | caggctgtgc tatccctgta cgcctctggc cgtaccactg gcatcgtgat ggactccggt |
| 661 | gacggggtca cccacactgt gcccatctac gaggggtatg ccctccccca tgccatcctg |
| 721 | cgtctggacc tggctggccg ggacctgact gactacctca tgaagatcct caccgagcgc |
| 781 | ggctacagct tcaccaccac ggccgagcgg gaaatcgtgc gtgacattaa ggagaagctg |
| 841 | tgctacgtcg ccctggactt cgagcaagag atggccacgg ctgcttccag ctcctccctg |
| 901 | gagaagagct acgagctgcc tgacggccag gtcatcacca ttggcaatga gcggttccgc |
| 961 | tgccctgagg cactcttcca gccttccttc ctgggcatgg agtcctgtgg catccacgaa |
| 1021 | actaccttca actccatcat gaagtgtgac gtggacatcc gcaaagacct gtacgccaac |
| 1081 | acagtgctgt ctggcggcac caccatgtac cctggcattg ccgacaggat gcagaaggag |
| 1141 | atcactgccc tggcacccag cacaatgaag atcaagatca ttgctcctcc tgagcgcaag |
| 1201 | tactccgtgt ggatcggcgg ctccatcctg gcctcgctgt ccaccttcca gcagatgtgg |
| 1261 | atcagcaagc aggagtatga cgagtccggc ccctccatcg tccaccgcaa atgcttctag |
| 1321 | gcggactatg acttagttgc gttacaccct ttcttgacaa aacctaactt gcgcagaaaa |
| 1381 | caagatgaga ttggcatggc tttatttgtt ttttttgttt tgttttggtt tttttttttt |
| 1441 | ttttggcttg actcaggatt taaaaactgg aacggtgaag gtgacagcag tcggttggag |
| 1501 | cgagcatccc ccaaagttca caatgtggcc gaggactttg attgcacatt gttgtttttt |
| 1561 | taatagtcat tccaaatatg agatgcgttg ttacaggaag tcccttgcca tcctaaaagc |
| 1621 | caccccactt ctctctaagg agaatggccc agtcctctcc caagtccaca caggggaggt |
| 1681 | gatagcattg ctttcgtgta aattatgtaa tgcaaaattt ttttaatctt cgccttaata |
| 1741 | cttttttatt ttgttttatt ttgaatgatg agccttcgtg cccccccttc cccctttttt |
| 1801 | gtcccccaac ttgagatgta tgaaggcttt tggtctccct gggagtgggt ggaggcagcc |
| 1861 | agggcttacc tgtacactga cttgagacca gttgaataaa agtgcacacc ttaaaaatga |
| 1921 | ggaaaaaaaa aaaaaaaaaa |

SEQ ID NO: 147 Human β-Actin Amino Acid Sequence (NP_001092.1)

| | |
|---|---|
| 1 | mdddiaalvv dngsgmckag fagddaprav fpsivgrprh qgvmvgmgqk dsyvgdeaqs |
| 61 | krgiltlkyp iehgivtnwd dmekiwhhtf ynelrvapee hpvllteapl npkanrekmt |
| 121 | qimfetfntp amyvaiqavl slyasgrttg ivmdsgdgvt htvpiyegya lphailrldl |
| 181 | agrdltdylm kiltergysf tttaereivr dikeklcyva ldfeqemata assssleksy |
| 241 | elpdgqviti gnerfrcpea lfqpsflgme scgihettfn simkcdvdir kdlyantvls |
| 301 | ggttmypgia drmqkeital apstmkikii apperkysvw iggsilasls tfqqmwiskq |
| 361 | eydesgpsiv hrkcf |

SEQ ID NO: 148 Mouse β-Actin cDNA Sequence (NM_007393.5; CDS: 110-1237)

| | |
|---|---|
| 1 | tataaaaccc ggcggcgcaa cgcgcagcca ctgtcgagtc gcgtccaccc gcgagcacag |
| 61 | cttctttgca gctccttcgt tgccggtcca cacccgccac cagttcgcca tggatgacga |
| 121 | tatcgctgcg ctggtcgtcg acaacggctc cggcatgtgc aaagccggct tcgcgggcga |
| 181 | cgatgctccc cgggctgtat tcccctccat cgtgggccgc cctaggcacc agggtgtgat |
| 241 | ggtgggaatg ggtcagaagg actcctatgt gggtgacgag gcccagagca agagaggtat |
| 301 | cctgaccctg aagtacccca ttgaacatgg cattgttacc aactgggacg acatggagaa |
| 361 | gatctggcac cacaccttct acaatgagct gcgtgtggcc cctgaggagc accctgtgct |
| 421 | gctcaccgag gcccccctga accctaaggc caaccgtgaa aagatgaccc agatcatgtt |
| 481 | tgagaccttc aacaccccag ccatgtacgt agccatccag gctgtgctgt ccctgtatgc |
| 541 | ctctggtcgt accacaggca ttgtgatgga ctccggagac ggggtcaccc acactgtgcc |
| 601 | catctacgag ggctatgctc tccctcacgc catcctgcgt ctggacctgg ctggccggga |
| 661 | cctgacagac tacctcatga agatcctgac cgagcgtggc tacagcttca ccaccacagc |
| 721 | tgagagggaa atcgtgcgtg acatcaaaga gaagctgtgc tatgttgctc tagacttcga |
| 781 | gcaggagatg gccactgccg catcctcttc ctccctggag aagagctatg agctgcctga |
| 841 | cggccaggtc atcactattg gcaacgagcg gttccgatgc cctgaggctc ttttccagcc |
| 901 | ttccttcttg ggtatggaat cctgtggcat ccatgaaact acattcaatt ccatcatgaa |
| 961 | gtgtgacgtt gacatccgta aagacctcta tgccaacaca gtgctgtctg gtggtaccac |
| 1021 | catgtaccca ggcattgctg acaggatgca gaaggagatt actgctctgg ctcctagcac |
| 1081 | catgaagatc aagatcattg ctcctcctga gcgcaagtac tctgtgtgga tcggtggctc |
| 1141 | catcctggcc tcactgtcca ccttccagca gatgtggatc agcaagcagg agtacgatga |
| 1201 | gtccggcccc tccatcgtgc accgcaagtg cttctaggcg gactgttact gagctgcgtt |
| 1261 | ttacaccctt tctttgacaa aacctaactt gcgcagaaaa aaaaaaaata agagacaaca |
| 1321 | ttggcatggc tttgtttttt taaatttttt ttaaagtttt tttttttttt tttttttttt |
| 1381 | tttttaagtt tttttgtttt gttttggcgc ttttgactca ggatttaaaa actggaacgg |
| 1441 | tgaaggcgac agcagttggt tggagcaaac atcccccaaa gttctacaaa tgtggctgag |
| 1501 | gactttgtac attgttttgt tttttttttt ttttggtttt gtcttttttt aatagtcatt |
| 1561 | ccaagtatcc atgaaataag tggttacagg aagtccctca ccctcccaaa agccaccccc |
| 1621 | actcctaaga ggaggatggt cgcgtccatg ccctgagtcc accccgggga aggtgacagc |
| 1681 | attgcttctg tgtaaattat gtactgcaaa aattttttta aatcttccgc cttaatactt |
| 1741 | catttttgtt tttaatttct gaatggccca ggtctgaggc ctcccttttt tttgtccccc |
| 1801 | caacttgatg tatgaaggct ttggtctccc tgggaggggg ttgaggtgtt gaggcagcca |
| 1861 | gggctggcct gtacactgac ttgagaccaa taaaagtgca caccttacct tacacaaaca |
| 1921 | aaaaaaaaaa aaaaa |

SEQ ID NO: 149 Mouse β-Actin Amino Acid Sequence (NP_031419.1)

| | |
|---|---|
| 1 | mdddiaalvv dngsgmckag fagddaprav fpsivgrprh qgvmvgmgqk dsyvgdeaqs |
| 61 | krgiltlkyp iehgivtnwd dmekiwhhtf ynelrvapee hpvllteapl npkanrekmt |
| 121 | qimfetfntp amyvaiqavl slyasgrttg ivmdsgdgvt htvpiyegya lphailrldl |
| 181 | agrdltdylm kiltergysf tttaereivr dikeklcyva ldfeqemata assssleksy |
| 241 | elpdgqviti gnerfrcpea lfqpsflgme scgihettfn simkcdvdir kdlyantvls |
| 301 | ggttmypgia drmqkeital apstmkikii apperkysvw iggsilasls tfqqmwiskq |
| 361 | eydesgpsiv hrkcf |

SEQ ID NO: 150 Human BCL7A cDNA Sequence variant 1 (NM_020993.4; CDS:
207-902)

| | |
|---|---|
| 1 | actgggccag gcgcgcggcg gccccgggct ttgtgtgtgt gtgtatgtgt gtgtgtgtgt |
| 61 | gtgtgtgtgt gtgagtgtgt gcgtgtgaga gtgcgagtgt ctgtgcgcga gtgagtgagc |
| 121 | ggcgggcggg cgcgagtgtg gccgccgcgg agcgcgagca ggacccggcg ggcgcgctcc |
| 181 | ccagcctccg tctccccgcc ggaaccatgt cgggcaggtc ggttcgagcc gagacgagga |
| 241 | gccgggccaa agatgatatc aagagggtca tggcggcgat cgagaaagtg cgcaaatggg |
| 301 | agaagaaatg ggtgaccgtt ggtgacacat ccctacgaat ctacaaatgg gtccctgtga |
| 361 | cggagcccaa ggttgatgac aaaaacaaga ataagaaaaa aggcaaggac gagaagtgtg |
| 421 | gctcagaggt gaccactccg gagaacagtt cctccccagg gatgatggac atgcatgacg |
| 481 | ataacagcaa ccagagctcc atcgcagatg cctcccccat caaacaggag aacagcagca |
| 541 | actccagccc cgctccagag cccaactcgg ctgtgcccag cgacggcacc gaggccaagg |
| 601 | tggatgaggc ccaggctgat gggaaggagc acccaggagc tgaagatgct tctgatgagc |
| 661 | agaattcaca gtcctcgatg gaacattcga tgaacagctc agagaaagta gatcggcagc |
| 721 | cgtctggaga ctcgggtctg gccgcagaga cgtctgcaat ctctcaggta cctcgctcga |
| 781 | ggtctcagag gggcagccag atcggccggg agcccattgg gttgtcgggg gatttggaag |
| 841 | gagtgccacc ctctaaaaag atgaaactgg aggcctctca acaaaactcc gaagagatgt |
| 901 | agacgatgct ttaaagcctc cgatccatgt tccatggaag gtacatcagc aattaattct |
| 961 | agagcaactt tgccccagcg attcctcttg ggtgcgaaca gaactactaa cgtttcaagt |
| 1021 | ttaccaagtg caaatccaag aagacccaga acggcgtcac ttctcagaca ctgaagaact |
| 1081 | ctgctgtgaa gcaaaacact caaaccttta agggactgtc cttggggagg caggcggggc |
| 1141 | tgacagctca ggagtgtctg cacactgtct cggaagccag gattccattt gtgttgctgc |
| 1201 | tgtattttcc ccccacttct ctatgtaacg atataagcta tcggagggtg gtaccgatca |
| 1261 | ggaacgcttt ttggcggggc tttccactgt tcaaccgatt ccttccgctt tctttttttg |
| 1321 | tgccttgtgc ccttgaggtg acctctggca tgtatcctgg tggttcttac atccccctct |
| 1381 | gcaaagtgcc ctcttggttt ggttcgggcg gcggctgcca ccctactcac cgctctcctc |
| 1441 | cctgccccag gacttcatcg gagcaggcag ggtggagcga aggagctcct tagcccacct |
| 1501 | ggtttgcagg tgcaggggga ccttaggcac gccccaagca ccaggcacca gggcccaagg |
| 1561 | acgcgcaggt gttggggcac agtccccaag ggctcggccc cttggatcag gctgggcact |
| 1621 | cgctgtgctc tcccctcctt ggggcgttta ggactgggcg tctccaagcc caccatggcc |
| 1681 | cagatggacg tgcaaagccc ttggaatttt ctggcacttc ctctctattg cccccaccac |
| 1741 | caccaccccc atcactgctt tctcccagac ctccgaatac gaaatggctt ctctggctga |
| 1801 | ctgcaaggct gtctccttaa ggcactgagt gggccgggga ggctgggagc cggcggcagg |
| 1861 | attagctggt gctgaacttt ctctcatagg acgtcgcttg gatttcaaat ccacggtcac |
| 1921 | ctgctgccct ttgcctcccc cgacgcccca gcctgtgccc cggagaggca ggatcgcagt |
| 1981 | ggtcagaatc cacgtgcttt cctattctca ggctgttctg actctgagcc aacagctgga |
| 2041 | ccgtgtctca tccccagaac atgccgtctg tccccaccgg ggagtgggcc ttgatggccg |
| 2101 | ggcctcgaag gccacaaaca aggcgtcgag gaattggaaa gatttgcaca ccctccagaa |
| 2161 | aggagagacg caatctcccc tccctcccat cccccacctt cgctggaaca gcttcctctc |
| 2221 | actgaacgga gacgccccct tggacgaact gcctaatcgt ttggttctga ggcctggttt |
| 2281 | gctcttaatt aatatatgaa ctcctcagac cttaaacctt ttcctaagct ttctttactg |
| 2341 | cactggagtt ctgactccct ttgagttgtg tgttactggg ggtggggtgg ggtcatgggt |
| 2401 | tttgttgttt ttgggggcta attggtgcat attcaggtac cacctttgac gtgtggctct |
| 2461 | ttctcctgac catcatggga agtgtctgct ggattccatt ttctaagagt ttctgagggt |
| 2521 | gaggctctta tttttttttt taagggatcc tgtctatttc ctgcacttcg agaagaatca |
| 2581 | aaatgttcct gaatttcaaa tacctcatgc aaaatgtctc ctgaaataag ggaaaaaaaa |
| 2641 | aaaaccacaa ctttgaaaat cttaatgttg aagttagcaa tgccgaaagg tttctgtctt |
| 2701 | aaaaaaaaaa atccttgtac ttatcaattt tgccccttag gcagtcagtt ttgttgagaa |
| 2761 | ctgtgtcctg catcctggcg cagaacctac ctgatgcggt tcctctccac gcatctcgag |
| 2821 | gcggcgttac ctccagattc cgtagagtta gagtcacatt tttctttgca gcgaaactcc |
| 2881 | atcttggtga gagatgaatt tggatattta tttccttctc tgtttttggg aaacgagagg |
| 2941 | ctacaaccaa gacagctgaa ggagaatgaa acacacacat ccacagaaac agagaggcgt |
| 3001 | aggtggccct gccgttgacc gcagcctctc tggacaggca aggggagttg gcgcaggtga |
| 3061 | ggactcagac gacgtccacc gtcccaaggc tgtcactagt atttctctga agtgcctgaa |
| 3121 | ggtaggaatg ggccggcgat tgggaccagc tgggccccac cacggccacg ccaggcaaag |
| 3181 | cgccagcagc cctgcactcc acgctggcca agaaggcctt ccacgcagaa tgacaagact |
| 3241 | gcaaaaatcc gatgtgcttc cttccctggc gcagtcgctc ctcgagccgc tgccccccac |
| 3301 | ccaccctgca cccctcgccc tccccccacc acagaatcta agacctttca gcttcgagcc |
| 3361 | agggggcggg ggatcccgag caaaagcctt ccgtggacat caggccccgt ggcctcaagg |
| 3421 | gctcccaggg caaacctaat tccccccaaa acgtgaagtc ggggaagctg cggctacaca |
| 3481 | ttccacaaag tgctggcact tacacccaca acccggaagg ctgtggaccg attcctctag |
| 3541 | ggtggtgacc tcccattagc aaacggtgtc atggtttgga atgttcatta tcgccaagaa |
| 3601 | cctggttaga ggcataaaga ccttttttca ccgttaccta attttttccc ctttcaagaa |
| 3661 | tttttttttt ttttggtgtg ttgtacagca gtataatttt tcacttattt attccatcag |
| 3721 | tagatatggt ttgtacaatg tacaattgtt tcatttcaga aaataaaaat ttcaaatcat |
| 3781 | gaa |

SEQ ID NO: 151 Human BCL7A Amino Acid Sequence isoform A (NP_066273.1)

| | |
|---|---|
| 1 | msgrsvraet rsrakddikr vmaaiekvrk wekkwvtvgd tslriykwvp vtepkvddkn |
| 61 | knkkkgkdek cgsevttpen ssspgmmdmh ddnsnqssia daspikqens snsspapepn |
| 121 | savpsdgtea kvdeaqadgk ehpgaedasd eqnsqssmeh smnssekvdr qpsgdsglaa |
| 181 | etsaisqvpr srsqrgsqig repiglsgdl egvppskkmk leasqqnsee m |

SEQ ID NO: 152 Human BCL7A cDNA Sequence variant 2 (NM_001024808.2; CDS:
207-839)

| | |
|---|---|
| 1 | actgggccag gcgcgcggcg gccccgggct ttgtgtgtgt gtgtatgtgt gtgtgtgtgt |
| 61 | gtgtgtgtgt gtgagtgtgt gcgtgtgaga gtgcgagtgt ctgtgcgcga gtgagtgagc |
| 121 | ggcgggcggg cgcgagtgtg gccgccgcgg agcgcgagca ggacccggcg ggcgcgctcc |
| 181 | ccagcctccg tctccccgcc ggaaccatgt cgggcaggtc ggttcgagcc gagacgagga |
| 241 | gccgggccaa agatgatatc aagagggtca tggcggcgat cgagaaagtg cgcaaatggg |
| 301 | agaagaaatg ggtgaccgtt ggtgacacat ccctacgaat ctacaaatgg gtccctgtga |
| 361 | cggagcccaa ggttgatgac aaaaacaaga ataagaaaaa aggcaaggac gagaagtgtg |
| 421 | gctcagaggt gaccactccg gagaacagtt cctccccagg gatgatggac atgcatgacg |
| 481 | ataacagcaa ccagagctcc atcgcagatg cctcccccat caaacaggag aacagcagca |
| 541 | actccagccc cgctccagag cccaactcgg ctgtgcccag cgacggcacc gaggccaagg |
| 601 | tggatgaggc ccaggctgat gggaaggagc acccaggagc tgaagatgct tctgatgagc |
| 661 | agaattcaca gtcctcgatg gaacattcga tgaacagctc agagaaagta gatcggcagc |
| 721 | cgtctggaga ctcgggtctg gccgcagaga cgtctgcaat ctctcaggat ttggaaggag |
| 781 | tgccaccctc taaaaagatg aaactggagg cctctcaaca aaactccgaa gagatgtaga |
| 841 | cgatgcttta aagcctccga tccatgttcc atggaaggta catcagcaat taattctaga |
| 901 | gcaactttgc cccagcgatt cctcttgggt gcgaacagaa ctactaacgt ttcaagttta |
| 961 | ccaagtgcaa atccaagaag acccagaacg gcgtcacttc tcagacactg aagaactctg |
| 1021 | ctgtgaagca aaacactcaa acctttaagg gactgtcctt ggggaggcag gcggggctga |
| 1081 | cagctcagga gtgtctgcac actgtctcgg aagccaggat tccatttgtg ttgctgctgt |
| 1141 | attttccccc cacttctcta tgtaacgata taagctatcg gagggtggta ccgatcagga |
| 1201 | acgctttttg gcggggcttt ccactgttca accgattcct tccgctttct ttttttgtgc |
| 1261 | cttgtgccct tgaggtgacc tctggcatgt atcctggtgg ttcttacatc cccctctgca |
| 1321 | aagtgccctc ttggtttggt tcgggcggcg gctgccaccc tactcaccgc tctcctccct |
| 1381 | gccccaggac ttcatcggag caggcagggt ggagcgaagg agctccttag cccacctggt |
| 1441 | ttgcaggtgc agggggacct taggcacgcc ccaagcacca ggcaccaggg cccaaggacg |
| 1501 | cgcaggtgtt ggggcacagt ccccaagggc tcggcccctt ggatcaggct gggcactcgc |
| 1561 | tgtgctctcc cctccttggg gcgtttagga ctgggcgtct ccaagcccac catggcccag |
| 1621 | atggacgtgc aaagcccttg gaattttctg gcacttcctc tctattgccc ccaccaccac |
| 1681 | cacccccatc actgctttct cccagacctc cgaatacgaa atggcttctc tggctgactg |
| 1741 | caaggctgtc tccttaaggc actgagtggg ccggggaggc tgggagccgg cggcaggatt |
| 1801 | agctggtgct gaactttctc tcataggacg tcgcttggat ttcaaatcca cggtcacctg |
| 1861 | ctgccctttg cctcccccga cgccccagcc tgtgccccgg agaggcagga tcgcagtggt |
| 1921 | cagaatccac gtgctttcct attctcaggc tgttctgact ctgagccaac agctggaccg |
| 1981 | tgtctcatcc ccagaacatg ccgtctgtcc ccaccgggga gtgggccttg atggccgggc |
| 2041 | ctcgaaggcc acaaacaagg cgtcgaggaa ttggaaagat ttgcacaccc tccagaaagg |
| 2101 | agagacgcaa tctcccctcc ctcccatccc ccaccttcgc tggaacagct tcctctcact |
| 2161 | gaacggagac gcccccttgg acgaactgcc taatcgtttg gttctgaggc ctggtttgct |
| 2221 | cttaattaat atatgaactc ctcagacctt aaaccttttc ctaagctttc tttactgcac |
| 2281 | tggagttctg actccctttg agttgtgtgt tactgggggt ggggtggggt catgggtttt |
| 2341 | gttgtttttg ggggctaatt ggtgcatatt caggtaccac ctttgacgtg tggctctttc |
| 2401 | tcctgaccat catgggaagt gtctgctgga ttccattttc taagagtttc tgagggtgag |
| 2461 | gctcttattt ttttttttaa gggatcctgt ctatttcctg cacttcgaga agaatcaaaa |
| 2521 | tgttcctgaa tttcaaatac ctcatgcaaa atgtctcctg aaataaggga aaaaaaaaaa |
| 2581 | accacaactt tgaaaatctt aatgttgaag ttagcaatgc cgaaaggttt ctgtcttaaa |
| 2641 | aaaaaaaatc cttgtactta tcaattttgc cccttaggca gtcagttttg ttgagaactg |
| 2701 | tgtcctgcat cctggcgcag aacctacctg atgcggttcc tctccacgca tctcgaggcg |
| 2761 | gcgttacctc cagattccgt agagttagag tcacattttt ctttgcagcg aaactccatc |
| 2821 | ttggtgagag atgaatttgg atatttattt ccttctctgt ttttgggaaa cgagaggcta |
| 2881 | caaccaagac agctgaagga gaatgaaaca cacacatcca cagaaacaga gaggcgtagg |
| 2941 | tggccctgcc gttgaccgca gcctctctgg acaggcaagg ggagttggcg caggtgagga |
| 3001 | ctcagacgac gtccaccgtc ccaaggctgt cactagtatt tctctgaagt gcctgaaggt |
| 3061 | aggaatgggc cggcgattgg gaccagctgg gccccaccac ggccacgcca ggcaaagcgc |
| 3121 | cagcagccct gcactccacg ctggccaaga aggccttcca cgcagaatga caagactgca |
| 3181 | aaaatccgat gtgcttcctt ccctggcgca gtcgctcctc gagccgctgc cccccaccca |
| 3241 | ccctgcaccc ctcgccctcc ccccaccaca gaatctaaga cctttcagct tcgagccagg |
| 3301 | gggcggggga tcccgagcaa aagccttccg tggacatcag gccccgtggc ctcaagggct |
| 3361 | cccagggcaa acctaattcc ccccaaaacg tgaagtcggg gaagctgcgg ctacacattc |
| 3421 | cacaaagtgc tggcacttac acccacaacc cggaaggctg tggaccgatt cctctagggt |
| 3481 | ggtgacctcc cattagcaaa cggtgtcatg gtttggaatg ttcattatcg ccaagaacct |
| 3541 | ggttagaggc ataaagacct tttttcaccg ttacctaatt ttttcccctt tcaagaattt |
| 3601 | tttttttttt tggtgtgttg tacagcagta taatttttca cttatttatt ccatcagtag |
| 3661 | atatggtttg tacaatgtac aattgtttca tttcagaaaa taaaaatttc aaatcatgaa |

SEQ ID NO: 153 Human BCL7A Amino Acid Sequence isoform B (NP_001019979.1)

| | |
|---|---|
| 1 | msgrsvraet rsrakddikr vmaaiekvrk wekkwvtvgd tslriykwvp vtepkvddkn |
| 61 | knkkkgkdek cgsevttpen ssspgmmdmh ddnsnqssia daspikqens snsspapepn |
| 121 | savpsdgtea kvdeaqadgk ehpgaedasd eqnsqssmeh smnssekvdr qpsgdsglaa |
| 181 | etsaisqdle gvppskkmkl easqqnseem |

SEQ ID NO: 154 Mouse BCL7A cDNA Sequence (NM_029850.3; CDS: 183-815)

| | |
|---|---|
| 1 | ttgcgcactg ggccccgggc gcgcggcggc accaggcttt gtgtgtgcgc gtatgtgtgt |
| 61 | gagtgtgtgt ctgtgcgcga gtgagagagc gggcgagtgt ggcgagcagg acccggcggg |
| 121 | cgcgctcccc cagcctccct ctctctctct ctttcctctc tctctccctc cccgccagaa |
| 181 | ccatgtcggg caggtcggtt cgagccgaga ccaggagccg ggccaaagat gatatcaaga |
| 241 | gggtcatggc ggctatcgag aaagtgcgca aatgggagaa gaaatgggtg accgttggcg |
| 301 | atacatccct acgaatctac aagtgggtcc ctgtgacgga gccaaaggtt gatgataaaa |
| 361 | acaagaacaa gaagaaaggc aaggacgaga agtgtggctc ggaggtgacc actccagaga |
| 421 | acagctcgtc tcctgggatg atggacatgc acgatgataa cagcaaccag agctccatag |
| 481 | cagacgcctc ccccatcaag caagagaaca gcagcaactc cagccctgcc ccagagacca |
| 541 | acccacccgt gcccagcgat ggcaccgaag ccaaggctga tgaggcgcag gccgatggaa |
| 601 | aagagcaccc tggagctgaa gatgcatccg aggagcaaaa ttcacagtct tcgatggaaa |
| 661 | actcggtgaa cagctccgag aaggcagaac ggcagccatc tgcagaatca gggttagcgg |
| 721 | cagaaacgtc ggcagtctct caggatttgg aaggagtgcc gccgtctaaa aagatgaagc |
| 781 | tggaagcctc tcaacagaac tcagaagaga tgtagacggc ccggcggaac cttctggtcc |
| 841 | atgtttcatg gcaggtacat cggcaggctt aattctagaa acacggccca agcgactcct |
| 901 | cttgggcgcg agcagaacta acgtttcaag tttactaaag tgcaaatcca agaagaacct |
| 961 | agagcggcgg cggcagcgga acttcgcaga cacttgacgg actctgccgt gaaaccgaaa |
| 1021 | cactcgaacc ttcaagtgac tgccctctgg gaggtgggtc gacagctcag gagtgtgtgc |
| 1081 | gcactgtctc ggaagccaag attacatttg tgttgctgct gtatccccct cccctcactt |
| 1141 | ctctatttaa cgatataagc tattcgaggg tggtaccaat caggaatttg ctttccatag |
| 1201 | gggcttttgg ctcttcaacc aattccttct gctttctttt tttgtgcctt gtaccctaga |
| 1261 | ggtgacctcc ggcatgcttc ctggtttttg catctctcct ggcaaagtgc ccacttgttt |
| 1321 | tggttggctg ctgcccccac ccccacccct tattgcctct ctcctccctg ccccaagact |
| 1381 | gcttcaaagc aagcagggta gagcggcggg agaccaggca cctttcagtg acccccttgg |
| 1441 | ttcaggtgag cagtgtttgg gcacaccctg agccccaact tccagggccc ctggggctac |
| 1501 | aagtttgcgg gggccggttt cccgagggct ggcctccttg gtcaggacac gccctcacct |
| 1561 | tttggagcca tggaggctag gcgtttgcaa ggcaaggtag cccagattga catgcaaaag |
| 1621 | cctttagatt tttctggcac ttccacccta tctcccctcc gccccctaac ctcacacccc |
| 1681 | gactctggcc acaactggca ctgcgctctc caggtcctcc gaagacgaaa tgaccaactg |
| 1741 | agcttgtctc cttaggatag taaagggctg ggaggttggg agccggcggc cggcaggaat |
| 1801 | agctggtgct gaactaactc tcccatagga cattgcttgg atttcaaatc catggtaacc |
| 1861 | tgctgccctt tgtccctgtc tcctatccac cgcaccccaa gccccccaaa accccaggca |
| 1921 | ggatgcgcct ggtatggcct gactctgaga ggctacaggt ggatggagac ccattcccag |
| 1981 | taccgcgctg ttggtctcct ctggggaccg gaccttaacc attgggcctc aggccagaag |
| 2041 | caaggcacag aggaaccggg aagatttgca cacagatttg cccccccaga aaggagcctc |
| 2101 | cgaggcactt ccttcccctg ctcttccttg cacggagaca gctctctctc actcagtgga |
| 2161 | gacgccactt ggacagacgg actgctcagc tgttgatttc tgaggcctgg tttgctctta |
| 2221 | atccctttgc tggacccctc agatctgaaa accttcccct atgctttctt actgcactgg |
| 2281 | agttcgaact ccctatgagt tgtgtgttgg ggggaggggc gggcggggtg ggttttgttt |
| 2341 | ttttgttgtt cttgtttcgt tttgtttcgt ttgctaattg gtgcatattc aggtaccacc |
| 2401 | ttttgacgtg tggatctttc tccaaaccac cacaagaagt gtctgccggg ctccgttttc |
| 2461 | taagagtttc tgaggggaca gctcccattt ctttttttgg tttcaaggga gctgtctatt |
| 2521 | tcctatactt caagaagaat caaaatgttc ctgaatttta aatacctcat gcaaaaatat |
| 2581 | ctcctgaaat aagggaaaaa aaaaaaactt tgaaaaatcg taatgttgaa gttagcgatg |
| 2641 | ctaaaatgtt tctgtcttaa aaaacaaaaa aattgttgta atacttagcg attttgcccc |
| 2701 | tcaggcggtc agttctgtcc agaactgtgt tctgcgtctt ggcccggaag caaccggatg |
| 2761 | catgacctct gaacggatct caaggccaag gcatctttac ctccagattc tagagttagg |
| 2821 | gcaacaacag ttttcttttg cagcaaaact ccgttctggt gaaagatgaa tttggatatt |
| 2881 | tatttctttt tctgggaaac aagaggttaa acaacgtaag cagctgaggg agaacccaac |
| 2941 | acgggcatcc acggaaccag cgggcgcggc cagggccgcc tatacctctt ctaccctccg |
| 3001 | cagcctctct ggacagtcag gaggagtcga tacagttgag aaagaagaca acgatgaggt |
| 3061 | tcgaggtacc gaggctgtca ttagtttttc tctgaagtgc ctgaacgtag gaatgggccg |
| 3121 | tcgacggagg ggaccattcg gatgttcccc cacctcgcga cggccgcgcc aggcaaagag |
| 3181 | ccagcagccc tgcactccac actggccagg aaaagccttc cacgaggagc ggtcagactg |
| 3241 | caaaatccaa tgtgcttcct tccccgccac ggtcctctct ctctctcggg gagccgatgg |
| 3301 | tccccgtccc tgaaccccct agcccgcatc cccaccacag aatctaagac ctttcatctg |
| 3361 | gccgagccag gggcaaaggg gatcctaagc aaatgccttc cgtggacaac aggccccacg |
| 3421 | gcctaaaggg ctcccagggc aaactttccc ccaacacttg aaggggggtg ggggggatgg |
| 3481 | cggctacaca ttccactaag tgcagcactc gcacccacaa cccggaagga aggctcttaa |
| 3541 | gcgattctca gagggtggtg actgcccatc atcgtcagac ggtgtcgtgg tttggaatgt |
| 3601 | taattatcgc agaggacctg gtagaggtat aaagaccttt tttcactgtt acctaatttt |
| 3661 | ttttttcctc ttacaatttt ttttttggtg tgttgtacag cagtataatt tttcacttat |
| 3721 | ttattccatc ggtagatatt gtttgtacaa tgtacaatgg tttcatttca gaaaataata |
| 3781 | ataataaaaa aaaaagttct gatcatgag |

SEQ ID NO: 155 Mouse BCL7A Amino Acid Sequence (NP_084126.1)

| | |
|---|---|
| 1 | msgrsvraet rsrakddikr vmaaiekvrk wekkwvtvgd tslriykwvp vtepkvddkn |
| 61 | knkkkgkdek cgsevttpen ssspgmmdmh ddnsnqssia daspikqens snsspapetn |
| 121 | ppvpsdgtea kadeaqadgk ehpgaedase eqnsqssmen svnssekaer qpsaesglaa |
| 181 | etsavsqdle gvppskkmkl easqqnseem |

SEQ ID NO: 156 Human BCL7B cDNA Sequence variant 1 (NM_001707.3; CDS:
158-766)

| | |
|---|---|
| 1 | gcgggcgggt gcgcgcgctt tctcgcgcac gcgcgcacgg agggggcgac ggccgctgtg |
| 61 | acgctgcggc ggcggcgggc gggcggcggc gcgtgaggcg cgcgatcccc ggtgtcttgg |
| 121 | gagcagtgcc ccggcccccg ccgctcccgc cgccgccatg tcgggccggt cggtccgggc |
| 181 | ggagacccgc agccgggcca aggacgacat caagaaggtg atggcggcca tcgagaaagt |
| 241 | gcggaaatgg gagaagaagt gggtgactgt gggtgacacg tccctgagga tatttaagtg |
| 301 | ggttcctgtg acagacagca aggagaaaga aaagtcaaaa tcgaacagtt cagcagcccg |
| 361 | agaacctaat ggctttcctt ctgatgcctc agccaattcc tctctccttc ttgaattcca |
| 421 | ggacgaaaac agcaaccaga gttccgtgtc tgacgtctat cagcttaagg tggacagcag |
| 481 | caccaactca agccccagcc cccagcagag tgagtccctg agcccagcac acacctccga |
| 541 | cttccgcacg gatgactccc agcccccaac gctgggccag gagatcctgg aggagccctc |
| 601 | cctgccctcc tcggaagttg ctgatgaacc tcctaccctc accaaggaag aaccagttcc |
| 661 | actagagaca caggtcgttg aggaagagga agactcaggt gccccgcccc tgaagcgctt |
| 721 | ctgtgtggac caacccacag tgccgcagac ggcgtcagaa agctagcacc atcccggccc |
| 781 | tccgcctcct ggccctgcct ctatttattg cattctggtt ctggccgcgc cgcgttgctg |
| 841 | gggtaagggc aagcactggg gtcaagagcc tgcacacatg agccttccgg gctggaaggc |
| 901 | tggcgtagga cttggggctg tagcatcatc ttcctgaccc tggcacctgt gtctacttgc |
| 961 | tcccgagaag aggagcgctc atgtcttttt tgcaccccaa gttggctgga gcatcggcca |
| 1021 | ccccaagatt catctgtgac ctccaggcag cagtctctgc tccagaatct ctggacggag |
| 1081 | ctgctggcag cttctgcgag aagagagaga tgtggaaggc accttctaga agagagcgtg |
| 1141 | cctcaggtta cttgaacttg aacggagact gtagactccc ggactttccc ctaggactgg |
| 1201 | gggccctgta ggctgctgtt ggaggactgg gtagagacat tggagggaag ggaagggctt |
| 1261 | ttctccacac aagggcagag agtccgtcta gatttcttgc tgtcctgcca gctctgccca |
| 1321 | tgcctgaggt ggtcctacct ctcacgggca ccctagctgc tgacagccct ttgtggccgc |
| 1381 | cgtccccatc ccctgccctc agcacacaca tctgcacaca cgcagctttg ttctcacctc |
| 1441 | tacctgtcat tccagcatcc ctgcctcttg tcacaaactg ccccagcaag aatttgaggt |
| 1501 | tctgacaaca gtacccatcc cccacagtac cccttcagct cagtttctag aaagctccct |
| 1561 | tttctttgaa atctgcatgt tgaattgaac tttgtgattt tattttttgt ttcaaaaaag |
| 1621 | tttaagaaaa tggaaatggg caacagtgag tgaagacata ttttagcact gaatagaata |
| 1681 | tttttaaaat taaactattt gaaatatgtc caaaaaaaaa aaaaaaaaa |

SEQ ID NO: 157 Human BCL7B Amino Acid Sequence isoform 1 (NP_001698.2)

| | |
|---|---|
| 1 | msgrsvraet rsrakddikk vmaaiekvrk wekkwvtvgd tslrifkwvp vtdskekeks |
| 61 | ksnssaarep ngfpsdasan sslllefqde nsnqssvsdv yqlkvdsstn sspspqqses |
| 121 | lspahtsdfr tddsqpptlg qeileepslp ssevadeppt ltkeepvple tqvveeeeds |
| 181 | gapplkrfcv dqptvpqtas es |

SEQ ID NO: 158 Human BCL7B cDNA Sequence variant 2 (NM_001197244.1; CDS:
158-595)

| | |
|---|---|
| 1 | gcgggcgggt gcgcgcgctt tctcgcgcac gcgcgcacgg agggggcgac ggccgctgtg |
| 61 | acgctgcggc ggcggcgggc gggcggcggc gcgtgaggcg cgcgatcccc ggtgtcttgg |
| 121 | gagcagtgcc ccggcccccg ccgctcccgc cgccgccatg tcgggccggt cggtccgggc |
| 181 | ggagacccgc agccgggcca aggacgacat caagaaggtg atggcggcca tcgagaaagt |
| 241 | gcggaaatgg gagaagaagt gggtgactgt gggtgacacg tccctgagga tatttaagtg |
| 301 | ggttcctgtg acagacagca aggagaaaga aaagtcaaaa tcgaacagtt cagcagcccg |
| 361 | agaacctaat ggctttcctt ctgatgcctc agccaattcc tctctccttc ttgaattcca |
| 421 | ggagccctcc ctgccctcct cggaagttgc tgatgaacct cctaccctca ccaaggaaga |
| 481 | accagttcca ctagagacac aggtcgttga ggaagaggaa gactcaggtg ccccgcccct |
| 541 | gaagcgcttc tgtgtggacc aacccacagt gccgcagacg gcgtcagaaa gctagcacca |
| 601 | tcccggccct ccgcctcctg gccctgcctc tatttattgc attctggttc tggccgcgcc |
| 661 | gcgttgctgg ggtaagggca agcactgggg tcaagagcct gcacacatga gccttccggg |
| 721 | ctggaaggct ggcgtaggac ttggggctgt agcatcatct tcctgaccct ggcacctgtg |
| 781 | tctacttgct cccgagaaga ggagcgctca tgtctttttt gcaccccaag ttggctggag |
| 841 | catcggccac cccaagattc atctgtgacc tccaggcagc agtctctgct ccagaatctc |
| 901 | tggacggagc tgctggcagc ttctgcgaga agagagagat gtggaaggca ccttctagaa |
| 961 | gagagcgtgc ctcaggttac ttgaacttga acggagactg tagactcccg gactttcccc |
| 1021 | taggactggg ggccctgtag gctgctgttg gaggactggg tagagacatt ggagggaagg |
| 1081 | gaagggcttt tctccacaca agggcagaga gtccgtctag atttcttgct gtcctgccag |
| 1141 | ctctgcccat gcctgaggtg gtcctacctc tcacgggcac cctagctgct gacagccctt |
| 1201 | tgtggccgcc gtccccatcc cctgccctca gcacacacat ctgcacacac gcagctttgt |
| 1261 | tctcacctct acctgtcatt ccagcatccc tgcctcttgt cacaaactgc cccagcaaga |
| 1321 | atttgaggtt ctgacaacag tacccatccc ccacagtacc ccttcagctc agtttctaga |
| 1381 | aagctccctt ttctttgaaa tctgcatgtt gaattgaact ttgtgatttt attttttgtt |
| 1441 | tcaaaaaagt ttaagaaaat ggaaatgggc aacagtgagt gaagacatat tttagcactg |
| 1501 | aatagaatat ttttaaaatt aaactatttg aaatatgtcc aaaaaaaaaa aaaaaaaa |

SEQ ID NO: 159 Human BCL7B Amino Acid Sequence isoform 2 (NP_001184173.1)

| | |
|---|---|
| 1 | msgrsvraet rsrakddikk vmaaiekvrk wekkwvtvgd tslrifkwvp vtdskekeks |
| 61 | ksnssaarep ngfpsdasan sslllefqep slpssevade pptltkeepv pletqvveee |
| 121 | edsgapplkr fcvdqptvpq tases |

SEQ ID NO: 160 Human BCL7B cDNA Sequence variant 3 (NM_001301061.1; CDS:
247-888)

| | |
|---|---|
| 1 | gcgggcgggt gcgcgcgctt tctcgcgcac gcgcgcacgg agggggcgac ggccgctgtg |
| 61 | acgctgcggc ggcggcgggc gggcggcggc gcgtgaggcg cgcgatcccc ggtgtcttgg |
| 121 | gagcagtgcc ccggcccccg ccgctcccgc cgccgccatg tcgggccggt cggtccgggc |
| 181 | ggagacccgc agccgggcca aggacgacat caagaaggtg atggcggcca tcgagaaagt |
| 241 | gcggaaatga cggaatctcg ctctgtcacc caggctggag tgcattggcg caatctcggc |
| 301 | tcactgcaac ctctgcctct caggttcaag caattctcct gcctcagcct cctgagtagc |
| 361 | tgggactaca gggagaagaa gtgggtgact gtgggtgaca cgtccctgag gatatttaag |
| 421 | tgggttcctg tgacagacag caaggagaaa gaaaagtcaa aatcgaacag ttcagcagcc |
| 481 | cgagaaccta atggctttcc ttctgatgcc tcagccaatt cctctctcct tcttgaattc |
| 541 | caggacgaaa acagcaacca gagttccgtg tctgacgtct atcagcttaa ggtggacagc |
| 601 | agcaccaact caagccccag cccccagcag agtgagtccc tgagcccagc acacacctcc |
| 661 | gacttccgca cggatgactc ccagccccca acgctgggcc aggagatcct ggaggagccc |
| 721 | tccctgccct cctcggaagt tgctgatgaa cctcctaccc tcaccaagga agaaccagtt |
| 781 | ccactagaga cacaggtcgt tgaggaagag gaagactcag gtgccccgcc cctgaagcgc |
| 841 | ttctgtgtgg accaacccac agtgccgcag acggcgtcag aaagctagca ccatcccggc |
| 901 | cctccgcctc ctggccctgc ctctatttat tgcattctgg ttctggccgc gccgcgttgc |
| 961 | tggggtaagg gcaagcactg gggtcaagag cctgcacaca tgagccttcc gggctggaag |
| 1021 | gctggcgtag gacttggggc tgtagcatca tcttcctgac cctggcacct gtgtctactt |
| 1081 | gctcccgaga agaggagcgc tcatgtcttt tttgcacccc aagttggctg gagcatcggc |
| 1141 | caccccaaga ttcatctgtg acctccaggc agcagtctct gctccagaat ctctggacgg |
| 1201 | agctgctggc agcttctgcg agaagagaga gatgtggaag gcaccttcta gaagagagcg |
| 1261 | tgcctcaggt tacttgaact tgaacggaga ctgtagactc ccggactttc ccctaggact |
| 1321 | gggggccctg taggctgctg ttggaggact gggtagagac attggaggga agggaagggc |
| 1381 | ttttctccac acaagggcag agagtccgtc tagatttctt gctgtcctgc cagctctgcc |
| 1441 | catgcctgag gtggtcctac ctctcacggg caccctagct gctgacagcc ctttgtggcc |
| 1501 | gccgtcccca tcccctgccc tcagcacaca catctgcaca cacgcagctt tgttctcacc |
| 1561 | tctacctgtc attccagcat ccctgcctct tgtcacaaac tgccccagca agaatttgag |
| 1621 | gttctgacaa cagtacccat cccccacagt accccttcag ctcagtttct agaaagctcc |
| 1681 | cttttctttg aaatctgcat gttgaattga actttgtgat tttatttttt gtttcaaaaa |
| 1741 | agtttaagaa aatggaaatg ggcaacagtg agtgaagaca tattttagca ctgaatagaa |
| 1801 | tatttttaaa attaaactat ttgaaatatg tccaaaaaaa aaaaaaaaaa a |

SEQ ID NO: 161 Human BCL7B Amino Acid Sequence isoform 3 (NP_001287990.1)

| | |
|---|---|
| 1 | mtesrsvtqa gvhwrnlgsl qplplrfkqf sclsllsswd yrekkwvtvg dtslrifkwv |
| 61 | pvtdskekek sksnssaare pngfpsdasa nsslllefqd ensnqssvsd vyqlkvdsst |
| 121 | nsspspqqse slspahtsdf rtddsqpptl gqeileepsl pssevadepp tltkeepvpl |
| 181 | etqvveeeed sgapplkrfc vdqptvpqta ses |

SEQ ID NO: 162 Mouse BCL7B cDNA Sequence (NM_009745.2; CDS: 136-744)

| | |
|---|---|
| 1 | acgcgcgcac ggaggggggg cgacggccgc ggtgacgtgc tgcggtggca gcgggtggac |
| 61 | ggcgacgcgt gaggcgcgtg atatcccgcg tcttgggagc actgtcccgg cccccagcca |
| 121 | ctccccgccg ccgccatgtc cggccgttcg gtccgggccg agacccgtag ccgggctaaa |
| 181 | gatgacatca agaaggtgat ggcggccatc gagaaagtgc ggaaatggga gaagaaatgg |
| 241 | gtgactgtgg gtgatacctc cctgaggata ttcaaatggg tgcctgtgac agatagcaag |
| 301 | gagaaagaaa agtcaaaatc gaataataca gcagcccggg aacctaatgg ctttccctct |
| 361 | gacgcctcag ccaattcctc cctcctcctt gaattccagg atgagaacag caaccagagc |
| 421 | tctgtgtcgg atgtctatca actcaaggtg gacagcagca ccaactcaag tcccagcccc |
| 481 | cagcagagcg agtccctgag cccagcacac acctcagact tccgcactga tgactcccag |
| 541 | ccccccacat tgggccagga gatcctggag gaaccttcgc tgcctgcatc tgaagttgca |
| 601 | gatgaacctc ccacactcac aaaggaagag ccagtgccgg tggagacaca gaccactgag |
| 661 | gaagaggagg actctggtgc tccgcccttg aagagattct gtgtggacca acctgtagta |
| 721 | ccgcagacca cgtcggaaag ctagcaccgt cctggcccct cgcctcctgg cccctgcctc |
| 781 | tatttattgc attctggtct ggccgagctc tgatgctggg gtccgggcaa gcactagggt |
| 841 | ccagagcctg tgcgtgggag ccctctgggc tagaaggctg atggagggcg tggggtcgtc |
| 901 | gcaccatctt cttgttcctg acacttgtgt ctgcttgctc ttgagcaaag gagcgctcac |
| 961 | atcttttctg tagcccaagt aggccagagc atcagggttc atttctcacc tccagaacca |
| 1021 | ctgcacggag ctgctggcgc cgccacgggg agaaaggtgt ggaaggcgcc cacctgagag |
| 1081 | aagagtgcct aggattactt gaattgaatg gagactgtgg agtatggact ttgccacagg |
| 1141 | gccaggccct gcaggctgct gctgggagag ggactgaccg gtagagatgt ggagaacacc |
| 1201 | ggagagaggc tcttccggga cggaggggct ttcgccacct ttgggcagaa gacccatggg |
| 1261 | agatgcatcc tgtgcctgag gcagacctgc ctctgttgga tgccccagct gctcccagcc |
| 1321 | ctgtgcctgc cagaaccttc tgctgcatcc tcacactcac taagcacacc tgaagctttc |
| 1381 | tattcacccg tcctttcatt ccaacgtccc cacctcctcc tgcagaaaac cccagccatg |
| 1441 | attggaggtt ctgaccacag tacctgcccc agtactcctt cagctcagac tttctagaaa |
| 1501 | gttccttttt ctttaaaatc tgcatgttta attaaacttt atgattttat tttttgtctg |
| 1561 | aaaaaagaaa agtttaagaa aatggaaatg ggtaacagca agtgaagacc tattttagca |
| 1621 | ctgaatagag tatttttaaa attaaacttt gaaatatgtc ttgttaaaaa aaaaaaaa |

SEQ ID NO: 163 Mouse BCL7B Amino Acid Sequence (NP_033875.2)

| | |
|---|---|
| 1 | msgrsvraet rsrakddikk vmaaiekvrk wekkwvtvgd tslrifkwvp vtdskekeks |
| 61 | ksnntaarep ngfpsdasan sslllefqde nsnqssvsdv yqlkvdsstn sspspqqses |
| 121 | lspahtsdfr tddsqpptlg qeileepslp asevadeppt ltkeepvpve tqtteeeeds |
| 181 | gapplkrfcv dqpvvpqtts es |

SEQ ID NO: 164 Human BCL7C cDNA Sequence variant 1 (NM_001286526.1; CDS:
359-1087)

| | |
|---|---|
| 1 | tccgtcccca actcgcgcgt ccgtccccaa ctcccgctct cggcggcggg cagggggcgc |
| 61 | tgagcgtcca ggcgctccaa gggggcgggc ccgggtcggg gcggggccgg ccgggcttcc |
| 121 | aggcctgggc tctggccgcc cgcgccaccg ggccgctccg gggacaggcc ggggcggggc |
| 181 | gcggcggcag gaaacggggc ggggacttgc ggaggcgttg gggacgagag agggcgcggc |
| 241 | caactccagg ggggacggca ggccgagagc gcggcgcccg ggcctggcgc ggagcctgag |
| 301 | cccgccggac gggaggcggc cccgccgcgg gctcggcccc ggccccagcc ccgccagcat |
| 361 | ggccggccgg actgtacggg ccgagacccg gagccgggcc aaggatgaca tcaagaaggt |
| 421 | gatggcgacc atcgagaagg tccggagatg ggagaagcga tgggtgactg tgggcgacac |
| 481 | ttcccttcgt atcttcaagt gggtgccagt ggtggatccc caggaggagg agcgaaggcg |
| 541 | ggcaggtggc ggggcagaga gatcccgtgg ccgggaacgt cggggcaggg gcgccagtcc |
| 601 | ccgagggggt ggccctctca tcctgctgga tcttaatgat gagaacagca accagagttt |
| 661 | ccattcggaa ggttccctgc aaaagggcac agagcccagt cctgggggca ccccccagcc |
| 721 | cagccgccct gtgtcacctg ccggaccccc agaaggggtc cctgaggagg ctcagccccc |
| 781 | acggctgggc caagagagag atcccggggg cataactgct ggcagcaccg acgaaccccc |
| 841 | aatgctgacc aaggaggagc ctgttccaga actgctggaa gctgaggatt cgggagtgag |
| 901 | aatgacgagg agagcccttc acgagaaggg gctgaagaca gagcccctca ggaggctcct |
| 961 | gcccaggagg ggcctccgga caaatgtccg gcccagttcc atggcggtgc cggacaccag |
| 1021 | agctcccggg ggaggcagca aggccccgag ggcacccaga acaatccccc agggtaaggg |
| 1081 | gaggtgagtg ggctccccaa gcaagccaag acccctaaag cctcccttgg ctgccccaag |
| 1141 | atccagccac tacctgtgcc ccgagggcgg aaagagcttc ccagctcacc caccgcggta |
| 1201 | acatcggagg gcgagcggcc ccacacctgc ccgaacctaa ggccacagca cccatctggc |
| 1261 | tcgccactgg cgcccgaatg catgggaagg gcttagggca gaactcggac cacatccagt |
| 1321 | gcctgaggcc gccttgctag aggcctaggg gaggggtgca ctgggctgcc tcgcccacct |
| 1381 | cctcacgcac ccatgcggcc accctcccag cggtctgagt gtgccatgcg aggcgcctgc |
| 1441 | caccccggga gaggcgccga gtcccgagtc ctgccggcac tgagcctccg ggtccacagc |
| 1501 | gggcaagggc cgtggcgggg acaagcgcag gggacccgcc ggcctcccgc cttctgcagc |
| 1561 | accacgagat gcccacgtgg cacctggacg tccatgcata tgttgaggcc cgtgcacgcg |
| 1621 | cagagacccc agcgcagaag ccgccccgca cgccagggct tatgtatgcc agcgctggga |
| 1681 | gacctccagc gcccgaggac atacggcaag tggttccacc agggtgtcag cctagcaggc |
| 1741 | caacctggga acccatgtgg acaagcggcc tttcagccca ggcgcccgcc tcgggtggag |
| 1801 | gcgtggagac ttctggcgca gccctgagct ggtggcctaa cctacctgga aaatcctagc |
| 1861 | ccgagaagca gcgcgagtga gccttttggg tggttccaag gcccttcacc aagctctcac |
| 1921 | ttcctgactt caccgttggg tctgttgtac taggaaataa taacgcctcc catttatcaa |
| 1981 | gggtttactc tgtaaaaa |

SEQ ID NO: 165 Human BCL7C Amino Acid Sequence isoform 1 (NP_001273455.1)

| | |
|---|---|
| 1 | magrtvraet rsrakddikk vmatiekvrr wekrwvtvgd tslrifkwvp vvdpqeeerr |
| 61 | ragggaersr grerrgrgas prgggplill dlndensnqs fhsegslqkg tepspggtpq |
| 121 | psrpvspagp pegvpeeaqp prlgqerdpg gitagstdep pmltkeepvp elleaedsgv |
| 181 | rmtrralhek glkteplrrl lprrglrtnv rpssmavpdt rapgggskap raprtipqgk |
| 241 | gr |

SEQ ID NO: 166 Human BCL7C cDNA Sequence variant 2 (NM_004765.3; CDS:
359-1012)

| | |
|---|---|
| 1 | tccgtcccca actcgcgcgt ccgtccccaa ctcccgctct cggcggcggg cagggggcgc |
| 61 | tgagcgtcca ggcgctccaa gggggcgggc ccgggtcggg gcggggccgg ccgggcttcc |
| 121 | aggcctgggc tctggccgcc cgcgccaccg ggccgctccg gggacaggcc ggggcggggc |
| 181 | gcggcggcag gaaacggggc ggggacttgc ggaggcgttg gggacgagag agggcgcggc |
| 241 | caactccagg ggggacggca ggccgagagc gcggcgcccg ggcctggcgc ggagcctgag |
| 301 | cccgccggac gggaggcggc cccgccgcgg gctcggcccc ggccccagcc ccgccagcat |
| 361 | ggccggccgg actgtacggg ccgagacccg gagccgggcc aaggatgaca tcaagaaggt |
| 421 | gatggcgacc atcgagaagg tccggagatg ggagaagcga tgggtgactg tgggcgacac |
| 481 | ttcccttcgt atcttcaagt gggtcccagt ggtggatccc caggaggagg agcgaaggcg |
| 541 | ggcaggtggc ggggcagaga gatcccgtgg ccgggaacgt cggggcaggg gcgccagtcc |
| 601 | ccgagggggt ggccctctca tcctgctgga tcttaatgat gagaacagca accagagttt |
| 661 | ccattcggaa ggttccctgc aaaagggcac agagcccagt cctgggggca ccccccagcc |
| 721 | cagccgccct gtgtcacctg ccggaccccc agaaggggtc cctgaggagg ctcagccccc |
| 781 | acggctgggc caagagagag atcccggggg cataactgct ggcagcaccg acgaaccccc |
| 841 | aatgctgacc aaggaggagc ctgttccaga actgctggaa gctgaggccc ccgaagctta |
| 901 | ccctgtcttt gagccagtgc cacctgtccc tgaggcagcc cagggtgaca cagaggactc |
| 961 | ggagggtgcc cccccactca agcgcatctg cccaaatgcc cctgacccct gagaagccgg |
| 1021 | cctgcctgtc ctgttgcccc aggggcccct ttggcttttt acaaataaag acccttttgt |
| 1081 | aaaaaaaaaa aaaaaaaaaa a |

SEQ ID NO: 167 Human BCL7C Amino Acid Sequence isoform 2 (NP_004756.2)

| | |
|---|---|
| 1 | magrtvraet rsrakddikk vmatiekvrr wekrwvtvgd tslrifkwvp vvdpqeeerr |
| 61 | ragggaersr grerrgrgas prgggplill dlndensnqs fhsegslqkg tepspggtpq |
| 121 | psrpvspagp pegvpeeaqp prlgqerdpg gitagstdep pmltkeepvp elleaeapea |
| 181 | ypvfepvppv peaaqgdted segapplkri cpnapdp |

SEQ ID NO: 168 Mouse BCL7C cDNA Sequence variant 1 (NM_001347652.1; CDS:
240-965)

| | |
|---|---|
| 1 | ggccggggct ctagcagccc gcgccgcccg ggccgctccg gggacgggcc ggggcggggc |
| 61 | gcggtcttag gaagccaggc ggggacgcgc ggaggcgttg gggagcgagg gagggcgcgg |
| 121 | ccaactcccg gagggacggc aggccgaaag agcggcgctg gggcctggcg ctcagcctga |
| 181 | gatcgccgga ccacaggccg ccccgccacg ggctctgtcc cggccccagc cccgccagca |
| 241 | tggccggccg gaccgtgcgg gccgagaccc ggagccgggc caaagatgac atcaagaagg |
| 301 | tgatggcgac catcgagaag gtccggagat gggagaagcg ctgggtgact gtgggagaca |
| 361 | cttcccttcg aatcttcaag tgggtgcctg tggtggatcc ccaggaggag gagaggcggc |
| 421 | gggcaggagg cggggcagag agatcccgtg gccgggagag acgtggtagg ggcaccagtc |
| 481 | ccagaggggg aggccccctc atcctactgg atctcaatga tgagaacagc aaccagagtt |
| 541 | tccattctga aggttcattg caaaagggtg ctgagcccag ccctgggggg acgccccagc |
| 601 | ccagccgccc tggatcacca actggacccc cagaagtgat tactgaagat actcagcccc |
| 661 | cacaattggg tcaggagaga gatccagggg ggacacctgc aggcggtact gatgaacccc |
| 721 | caaagctgac caaggaggag cctgttccag aattgctaga agctgaggat tccggcgtga |
| 781 | gactcaccag gagagccctt caagagaaag gcctgaaaac cgagcccctc aggaggcttc |
| 841 | tccccaggag aggcctccgg acaaattctc ggccaacttc cacggttccg gaacccagag |
| 901 | ctcccggaag tgggagcaag gcccagaggg cacccaggac gataccacaa gggaagggga |
| 961 | ggtgagcggg ttccaccaca caaggggagg cccttaggtc ttccttagct gcctcaagat |
| 1021 | ccagtcattt acccacaccg tttaagggtg gagagggctt tggagctggg cacccgcagc |
| 1081 | cagcaatgga ggtcggcagc cagctctctg cttgtccctg tccctaaatt atggatccat |
| 1141 | cctgcttgct gtgggtccaa aactactggg ccagagcagg tcccagacag ggaatgtctg |
| 1201 | gggacatctc taggtgatgc ctagaagcaa cttgaataca caaaatggtg gatcctatgc |
| 1261 | caacttggtc acctcctcac acacttaggg cagccatcca ccaaagggcc aggcatggcc |
| 1321 | cctggaggtg accttcgacc tttggaacta cagtatctac actggtgagg ggccctacca |
| 1381 | gcaagacttg agcagcgagc aacccctgaa gcactgggca aaaggtaatg ccacagcttg |
| 1441 | tgaatggtgt gaagattcaa ttgcccgtgt gtagagacac cactccagca agcacctggc |
| 1501 | agcctcaccc gcttccacga gcctatggac tctgggcctg ctaattaacc cttggctcca |
| 1561 | gaagacatgt gccaaccagg gtgccaacct tgcctcaggt caatcgaggg gtgcacatgg |
| 1621 | cccagtgacc tttcagacca ggccacagcc tcctgcccca ggaatggatg gagacatgtg |
| 1681 | gtccagcact gccaaatcta cctggaaact acccactttg agaaactcat ggcagatgag |
| 1741 | ccatctgagt gattccaagg gctttcatca acctcttgcc tccgacttga caactcactt |
| 1801 | ggccaggagg tagtgtctcc tgtaccacag agagctaact gtactacata ttgcaacttg |
| 1861 | tgggacttat ttaatgcagc actcctgtca tagatcctgt tactttcaca ttttacagat |
| 1921 | atagaaaaca agcaaccagg aggttaaaga gcttgcccca agtcacacag cctgtctgtg |
| 1981 | gcagagccag cattcacatc cagtctaccc acctgactcc acagtccctg ctagtgtacc |
| 2041 | actttttgtg ctgggcatgc aggtgggctg cagctgtgag ctttgttgag gcgttcattg |
| 2101 | aaggaacatc catttttctc agtggcaaat tacaaaggac ttttaatttt aactttcttc |
| 2161 | tgcctgacct accttccttc cttccttcct tccttccttc cttccttcct tccttccttc |
| 2221 | cttccttcct tcctttcttc ctctgctggc catgaaccca ctagaccagg ccagtcttga |
| 2281 | actcacagag gtctgtctat ctctgcctct ccagtgctgg gattaaaggt gagcgacacc |
| 2341 | atacccagct taggccttct ttgtttgttt gtttgttgtt ttttgagtaa taaggtaagc |
| 2401 | agatgttctg tgtccataac tgagatgaca tggacattga gtggtaaggg acttgagctc |
| 2461 | agcccctggg tccctcagat tcctctctgg agtgccattg atacaggaag catcatctag |
| 2521 | gcccagctcc tgattggcga cttcccagaa gccatgggct gtcatgccaa gtgactgggg |
| 2581 | aacttcaagt aacaaacatt tattaattag acttctgaac taccaatggg gcagaagttt |
| 2641 | tcacgtttca aacacagata ctagttttca agattcagaa atgaaacata ggaattctgg |
| 2701 | ggaggtccag aaagtcctac tttgtatttt tcataactct ctgtatctta aaagctaaga |
| 2761 | aactcacagt tcatcgtagt ttaaaagagc tgcaagcctt aaatattcaa aaggtagaaa |
| 2821 | ctgccagtgt gtgtcactgg gtagtagttg aataacaaaa tgtttacgga tccaattaga |
| 2881 | ttcatggtac tccagagtca tgagttgaaa tcgcggatat aaagacttat ttccaatgca |
| 2941 | tcatttctca gaacaccctg ggatttgtat aaaacacacg atgcatgtga acgcattcat |
| 3001 | gtttatctta tttctgagaa tcattctaca ggcgggggag cacgcataca tttttaatgt |
| 3061 | cagggctaca gaagactggc ctggcacggc tcccctcagt tcttggttcc caaattctaa |
| 3121 | ggatgtctgc cttcgtttca tgtgtcagcc tttcctgctc tcggacctga cacagtggct |
| 3181 | ccgtacagcg aggactcctc tgtgctgatg aacttcggct gttagaggac tgttagtatg |
| 3241 | tttcctgttt cgccaattta tttgctgatt ggttttgtga ttcaaaaaac aaacaagcaa |
| 3301 | gcaaacaaac aaaaacaaaa gcagggacca ggcgtggtgg cgcacgcctt taatcttgga |
| 3361 | ggcagaggca ggcggatttc tgagttcgag gccaacctga tctacaaagt gagttccagg |
| 3421 | acagccaggg ctatacagag aaaccctgtc tcaaaaacaa acaaacaaaa acaaacaaaa |
| 3481 | aaacaaaagc agacaaaatc accaccagca gcagcaacaa tcccaggttt cccaataatg |
| 3541 | tcagcaagga attctgaaca gacaaagtcc gtggggctga gcagggacgg tgaataagtg |
| 3601 | agctcgtgtt tatgaagccc agtgatctgc tccttgcagc cagaacgctc cagctcagcc |
| 3661 | aggccctggc acgagccctc ggctgaagca ctcacctctg agcttcagtt tagtgagtag |
| 3721 | catcctccct agaaagtaat attcttgctt catacggtga tatggtggaa gggttaccag |
| 3781 | catggctttg gagtcagaca gactgtggtt caaatcttag ctacacgact ttctacctct |
| 3841 | ttgatttggg gcaagttcta accgctggct ttttctcttc tgtaaaatga ggacatggaa |
| 3901 | tctatttcac agggctgtgg cttcagtgag atcacatatg acccgcttaa gtcaaagcgg |
| 3961 | gtccacggta tgtgtttgat cccacgtagg cattacccgc tgtatctacc tcacagggca |
| 4021 | gttgtgagga tgaagggtag agggaaatgc tttccaaact gtgaagtgat ctgtgtttac |
| 4081 | ctctctcctc tggagatgga gagataggaa gttgctgtca gacactagtg ggatgcccat |
| 4141 | ggagagggcc tagtatgctt ctgtgcacac agtgtggctg ggctgaaggg gaggtgctgt |
| 4201 | gttgtgcagt ggtgcacagc gggggcgtgc cctccggtga gggttgctgc actgaagtgg |
| 4261 | ggaagttcag tgcctatggc tacactgttg ggagcaggga gagcgcaggt cctatcttaa |
| 4321 | gaaggatgct agatgggggc taaagtagat gagtgtttgc ctagcatgag caagggccat |
| 4381 | ggatttcgta tctagcacct caggaaaaac acaacaaaca aacaaacaaa caaacccctc |
| 4441 | ttcttgttta aagattctgg ataaagaaca gtgttgtgaa cgtgtgtatc cactgtttgt |
| 4501 | ctttttaaat acaactcaaa tagcaggaag gcctgtgtgc acaagaggtg acaagtgact |
| 4561 | gcaagtgttt ccatcgctgg cagccatgca ccctcctacc acgagtacag atttcattct |
| 4621 | ggagtgtgca gaccaaatgc aggtcagagg gccctcccgg ggcaactcgc caagatcctg |
| 4681 | accaaagcct agcctcacaa agtaatccct agcccagtta gcagatcagg ggttggggct |
| 4741 | tgggaacgtc atgtccaatg tccaaggctg cacaggtcct gtggggacag aatccaagcc |
| 4801 | cttcacctgg attggggttc ctccgcctgc cagtctcaga tctctgatct tgaacaagga |
| 4861 | tagcatgcag aagagtaagg ttccatgcct aagtgacctc ctctggacct cagacgcagt |
| 4921 | tcttgctcct gacctcatgc ctcgtctcca gacatcactc cccagcttag cccttaggtc |
| 4981 | aggctcctct gggcaccatc cttagattca acccaaagga gggtcctctc attctaacca |
| 5041 | gactgtctct ccaaatacca ccctagtcag ctccttggct tctcagtgtc cccttggaga |
| 5101 | acatggggta taggttccca gctagttcag tggcattcca cagcccatct cttgtgaggt |
| 5161 | cccactcctt aacaatggtc tttcagtttc aaacgcatgc ggccagcggg cagtctaggg |
| 5221 | acccttcaaa gtcaatgctt cttgattaaa ttatcgagac taatgtttaa ctttgagata |
| 5281 | cgttttctga gagttgctaa ccggttggag atgaacttag agaatagggt tcaccttttt |
| 5341 | cgtctgtcag cgggttatcg agtgcccagt ggtgtgccag attcagcagc tggtgcagga |
| 5401 | gatacattcg tgagcaaaac agatctgagc cctgacttcg ggaggcctcc tcctaacaac |
| 5461 | tagggcagat ataaccagtg ttccctgaat acaaacgcct agcctggcat ggtggcacac |
| 5521 | acctatgatg tcagccctta ggagccggag gtaagaagat caggagttca gctatctttg |
| 5581 | gccaacctgg gctacataag accgtgtctt aaaaaaaaaa aaaaaaatcc aaacaaaata |
| 5641 | cacactataa ctgtgagaaa tgttgtgaag agaaaggtcc aaatgcagtg aaagagctca |
| 5701 | gtaaaaaaag tgtggggtgt gttaggacag tgacaacatg tgcccgtatg tggagaagag |
| 5761 | aatcctgggt aatgggagga gcttactgta ttggaatcgg cagcagcagt gaggtctgct |
| 5821 | gctggacgga gcctgccccc caggctgggt ggggaaggtg tcacggacct tgcagaccac |
| 5881 | ggtaaggaac ttgcattctg gtgtttaact ttttatttgg agaccatttc aaagtgactg |
| 5941 | gaaccttatg agagtggcac aaaagatgtc tgcatacttt ggctgcagcc tccccgactg |
| 6001 | acctgtaaac gttctgttcc ccgagtcacc acccgtgtct ccctgtgatg tgtactcata |
| 6061 | gcctgtagtc cgaactctga gaatgagttg catacattgt gtctgtttac acttaaaaca |
| 6121 | cagtggagac cccctacagt aatgcctcgc ccgcctccgc ctgccacact gggtttatcg |
| 6181 | ctggttggtg gctccacact gtttgttggt cgtctctcta gtcaccttca ttagcatctt |
| 6241 | ccctttagga caagtcacgt ctgcgaatga tgtggaccat gcgttgtgct ttcttgctcg |
| 6301 | tatcttttaa tgtggcgtag tttctttcct ctctgtttga atagactatt tctccttttg |

SEQ ID NO: 169 Mouse BCL7C Amino Acid Sequence isoform 1 (NP_001334581.1)

| | |
|---|---|
| 1 | magrtvraet rsrakddikk vmatiekvrr wekrwvtvgd tslrifkwvp vvdpqeeerr |
| 61 | ragggaersr grerrgrgts prgggplill dindensnqs fhsegslqkg aepspggtpq |
| 121 | psrpgsptgp pevitedtqp pqlgqerdpg gtpaggtdep pkltkeepvp elleaedsgv |
| 181 | rltrralqek glkteplrrl lprrglrtns rptstvpepr apgsgskaqr aprtipqgkg |
| 241 | r |

SEQ ID NO: 170 Mouse BCL7C cDNA Sequence variant 2 (NM_009746.2; CDS:
240-893)

| | |
|---|---|
| 1 | ggccggggct ctagcagccc gcgccgcccg ggccgctccg gggacgggcc ggggcggggc |
| 61 | gcggtcttag gaagccaggc ggggacgcgc ggaggcgttg gggagcgagg gagggcgcgg |
| 121 | ccaactcccg gagggacggc aggccgaaag agcggcgctg gggcctggcg ctcagcctga |
| 181 | gatcgccgga ccacaggccg ccccgccacg ggctctgtcc cggccccagc cccgccagca |
| 241 | tggccggccg gaccgtgcgg gccgagaccc ggagccgggc caaagatgac atcaagaagg |
| 301 | tgatggcgac catcgagaag gtccggagat gggagaagcg ctgggtgact gtgggagaca |
| 361 | cttcccttcg aatcttcaag tgggtgcctg tggtggatcc ccaggaggag gagaggcggc |
| 421 | gggcaggagg cggggcagag agatcccgtg gccgggagag acgtggtagg ggcaccagtc |
| 481 | ccagaggggg aggccccctc atcctactgg atctcaatga tgagaacagc aaccagagtt |
| 541 | tccattctga aggttcattg caaaagggtg ctgagcccag ccctgggggg acgccccagc |
| 601 | ccagccgccc tggatcacca actggacccc cagaagtgat tactgaagat actcagcccc |
| 661 | cacaattggg tcaggagaga gatccagggg ggacacctgc aggcggtact gatgaacccc |
| 721 | caaagctgac caaggaggag cctgttccag aattgctaga agctgaggcc cccgaagctt |
| 781 | accctgtctt tgagccagtg ccatctgtcc ctgaggcagc ccagggtgac acagaggact |
| 841 | cggagggcgc ccccccactc aagcgcatct gtccaaatgc ccctgacccc tgagaagccg |
| 901 | cctgcctcct gtcctgttgc tccaggggcc cctttggctt tttataaata aagacccttt |
| 961 | tgtaaaaaaa aaaaaaaaaa a |

SEQ ID NO: 171 Mouse BCL7C Amino Acid Sequence isoform 2 (NP_033876.1)

| | |
|---|---|
| 1 | magrtvraet rsrakddikk vmatiekvrr wekrwvtvgd tslrifkwvp vvdpqeeerr |
| 61 | ragggaersr grerrgrgts prgggplill dindensnqs fhsegslqkg aepspggtpq |
| 121 | psrpgsptgp pevitedtqp pqlgqerdpg gtpaggtdep pkltkeepvp elleaeapea |
| 181 | ypvfepvpsv peaaqgdted segapplkri cpnapdp |

SEQ ID NO: 172 Human SMARCA2 Amino Acid Sequence Isoform A
(NP_001276325.1 and NP_003061.3)

| | |
|---|---|
| 1 | mstptdpgam phpgpspgpg pspgpilgps pgpgpspgsv hsmmgpspgp psvshpmptm |
| 61 | gstdfpqegm hqmhkpidgi hdkgivedih cgsmkgtgmr pphpgmgppq spmdqhsqgy |
| 121 | msphpsplga pehvsspmsg ggptppqmpp sqpgalipgd pqamsqpnrg pspfspvqlh |
| 181 | qlraqilayk mlargqplpe tlqlavqgkr sSpglqqqqq qqqqqqqqqq qqqqqqqqpq |
| 241 | qqppqpqtqq qqqpalvnyn rpsgpgpels gpstpqklpv papggrpspa ppaaaqppaa |
| 301 | avpgpsvpqp apgqpspvlq lqqkqsrisp iqkpqgldpv eilqereyrl qariahriqe |
| 361 | lenlpgslpp dlrtkatvel kalrllnfqr qlrqevvacm rrdttletal nskaykrskr |
| 421 | qtlrearmte klekqqkieq erkrrqkhqe ylnsilqhak dfkeyhrsva gkiqklskav |
| 481 | atwhantere qkketeriek ermrrlmaed eegyrklidq kkdrrlayll qqtdeyvanl |
| 541 | tnlvwehkqa qaakekkkrr rrkkkaeena eggesalgpd gepidessqm sdlpvkvtht |
| 601 | etgkvlfgpe apkasqldaw lemnpgyeva prsdseesds dyeeedeeee ssrqeteeki |
| 661 | lldpnseevs ekdakqiiet akqdvddeys mqysargsqs yytvahaise rvekqsalli |
| 721 | ngtlkhyqlq glewmvslyn nnlngilade mglgktiqti alitylmehk ringpyliiv |
| 781 | plstlsnwty efdkwapsvv kisykgtpam rrslvpqlrs gkfnvlltty eyiikdkhil |
| 841 | akirwkymiv deghrmknhh ckltqvlnth yvaprrillt gtplqnklpe lwallnfllp |
| 901 | tifkscstfe qwfnapfamt gervdlneee tiliirrlhk vlrpfllrrl kkevesqlpe |
| 961 | kveyvikcdm salqkilyrh mqakgilltd gsekdkkgkg gaktlmntim qlrkicnhpy |
| 1021 | mfqhieesfa ehlgysngvi ngaelyrasg kfelldrilp klratnhrvl lfcqmtslmt |
| 1081 | imedyfafrn flylrldgtt ksedraallk kfnepgsqyf ifllstragg 1glnlqaadt |
| 1141 | vvifdsdwnp hqdlqaqdra hrigqqnevr vlrlctvnsv eekilaaaky klnvdqkviq |
| 1201 | agmfdqksss herraflqai leheeeneee devpddetln qmiarreeef dlfmrmdmdr |
| 1261 | rredarnpkr kprlmeedel pswiikddae verltceeee ekifgrgsrq rrdvdysdal |
| 1321 | tekqwlraie dgnleemeee vrlkkrkrrr nvdkdpaked vekakkrrgr ppaeklspnp |
| 1381 | pkltkqmnai idtvinykdr cnvekvpsns qleiegnssg rqlsevfiql psrkelpeyy |
| 1441 | elirkpvdfk kikerirnhk yrslgdlekd vmllchnaqt fnlegsqiye dsivlqsvfk |
| 1501 | sarqkiakee esedesneee eeedeeeses eaksvkvkik Inkkddkgrd kgkgkkrpnr |
| 1561 | gkakpvvsdf dsdeeqdere qsegsgtdde |

SEQ ID NO: 173 Human SMARCA2 cDNA Sequence Variant 1 (NM_003070.4,
CDS: 223-4995)

| | |
|---|---|
| 1 | gcgtcttccg gcgcccgcgg aggaggcgag ggtgggacgc tgggcggagc ccgagtttag |
| 61 | gaagaggagg ggacggctgt catcaatgaa gtcatattca taatctagtc ctctctccct |
| 121 | ctgtttctgt actctgggtg actcagagag ggaagagatt cagccagcac actcctcgcg |
| 181 | agcaagcatt actctactga ctggcagaga caggagaggt agatgtccac gcccacagac |
| 241 | cctggtgcga tgccccaccc agggccttcg ccggggcctg ggccttcccc tgggccaatt |
| 301 | cttgggccta gtccaggacc aggaccatcc ccaggttccg tccacagcat gatggggcca |
| 361 | agtcctggac ctccaagtgt ctcccatcct atgccgacga tggggtccac agacttccca |
| 421 | caggaaggca tgcatcaaat gcataagccc atcgatggta tacatgacaa ggggattgta |
| 481 | gaagacatcc attgtggatc catgaagggc actggtatgc gaccacctca cccaggcatg |
| 541 | ggccctcccc agagtccaat ggatcaacac agccaaggtt atatgtcacc acacccatct |
| 601 | ccattaggag ccccagagca cgtctccagc cctatgtctg gaggaggccc aactccacct |
| 661 | cagatgccac caagccagcc gggggccctc atcccaggtg atccgcaggc catgagccag |
| 721 | cccaacagag gtccctcacc tttcagtcct gtccagctgc atcagcttcg agctcagatt |
| 781 | ttagcttata aaatgctggc ccgaggccag cccctccccg aaacgctgca gcttgcagtc |
| 841 | caggggaaaa ggacgttgcc tggcttgcag caacaacagc agcagcaaca gcagcagcag |
| 901 | cagcagcagc agcagcagca gcagcagcaa cagcagccgc agcagcagcc gccgcaacca |
| 961 | cagacgcagc aacaacagca gccggccctt gttaactaca acagaccatc tggcccgggg |
| 1021 | ccggagctga gcggcccgag caccccgcag aagctgccgg tgcccgcgcc cggcggccgg |
| 1081 | ccctcgcccg cgccccccgc agccgcgcag ccgcccgcgg ccgcagtgcc cgggccctca |
| 1141 | gtgccgcagc cggccccggg gcagccctcg cccgtcctcc agctgcagca gaagcagagc |
| 1201 | cgcatcagcc ccatccagaa accgcaaggc ctggaccccg tggaaattct gcaagagcgg |
| 1261 | gaatacagac ttcaggcccg catagctcat aggatacaag aactggaaaa tctgcctggc |
| 1321 | tctttgccac cagatttaag aaccaaagca accgtggaac taaaagcact tcggttactc |
| 1381 | aatttccagc gtcagctgag acaggaggtg gtggcctgca tgcgcaggga cacgaccctg |
| 1441 | gagacggctc tcaactccaa agcatacaaa cggagcaagc gccagactct gagagaagct |
| 1501 | cgcatgaccg agaagctgga gaagcagcag aagattgagc aggagaggaa acgccgtcag |
| 1561 | aaacaccagg aatacctgaa cagtattttg caacatgcaa aagattttaa ggaatatcat |
| 1621 | cggtctgtgg ccggaaagat ccagaagctc tccaaagcag tggcaacttg gcatgccaac |
| 1681 | actgaaagag agcagaagaa ggagacagag cggattgaaa aggagagaat gcggcgactg |
| 1741 | atggctgaag atgaggaggg ttatagaaaa ctgattgatc aaaagaaaga caggcgttta |
| 1801 | gcttaccttt tgcagcagac cgatgagtat gtagccaatc tgaccaatct ggtttgggag |
| 1861 | cacaagcaag cccaggcagc caaagagaag aagaagagga ggaggaggaa gaagaaggct |
| 1921 | gaggagaatg cagagggtgg ggagtctgcc ctgggaccgg atggagagcc catagatgag |
| 1981 | agcagccaga tgagtgacct ccctgtcaaa gtgactcaca cagaaaccgg caaggttctg |
| 2041 | ttcggaccag aagcacccaa agcaagtcag ctggacgcct ggctggaaat gaatcctggt |
| 2101 | tatgaagttg cccctagatc tgacagtgaa gagagtgatt ctgattatga ggaagaggat |
| 2161 | gaggaagaag agtccagtag gcaggaaacc gaagagaaaa tactcctgga tccaaatagc |
| 2221 | gaagaagttt ctgagaagga tgctaagcag atcattgaga cagctaagca agacgtggat |
| 2281 | gatgaataca gcatgcagta cagtgccagg ggctcccagt cctactacac cgtggctcat |
| 2341 | gccatctcgg agagggtgga gaaacagtct gccctcctaa ttaatgggac cctaaagcat |
| 2401 | taccagctcc agggcctgga atggatggtt tccctgtata ataacaactt gaacggaatc |
| 2461 | ttagccgatg aaatggggct tggaaagacc atacagacca ttgcactcat cacttatctg |
| 2521 | atggagcaca aaagactcaa tggcccctat ctcatcattg ttcccctttc gactctatct |
| 2581 | aactggacat atgaatttga caaatgggct ccttctgtgg tgaagatttc ttacaagggt |
| 2641 | actcctgcca tgcgtcgctc ccttgtcccc cagctacgga gtggcaaatt caatgtcctc |
| 2701 | ttgactactt atgagtatat tataaaagac aagcacattc ttgcaaagat tcggtggaaa |
| 2761 | tacatgatag tggacgaagg ccaccgaatg aagaatcacc actgcaagct gactcaggtc |
| 2821 | ttgaacactc actatgtggc ccccagaagg atcctcttga ctgggacccc gctgcagaat |
| 2881 | aagctccctg aactctgggc cctcctcaac ttcctcctcc caacaatttt taagagctgc |
| 2941 | agcacatttg aacaatggtt caatgctcca tttgccatga ctggtgaaag ggtggactta |
| 3001 | aatgaagaag aaactatatt gatcatcagg cgtctacata aggtgttaag accattttta |
| 3061 | ctaaggagac tgaagaaaga agttgaatcc cagcttcccg aaaaagtgga atatgtgatc |
| 3121 | aagtgtgaca tgtcagctct gcagaagatt ctgtatcgcc atatgcaagc caaggggatc |
| 3181 | cttctcacag atggttctga gaaagataag aaggggaaag gaggtgctaa gacacttatg |
| 3241 | aacactatta tgcagttgag aaaaatctgc aaccacccat atatgtttca gcacattgag |
| 3301 | gaatcctttg ctgaacacct aggctattca aatggggtca tcaatggggc tgaactgtat |
| 3361 | cgggcctcag ggaagtttga gctgcttgat cgtattctgc caaaattgag agcgactaat |
| 3421 | caccgagtgc tgcttttctg ccagatgaca tctctcatga ccatcatgga ggattatttt |
| 3481 | gcttttcgga acttccttta cctacgcctt gatggcacca ccaagtctga agatcgtgct |
| 3541 | gctttgctga agaaattcaa tgaacctgga tcccagtatt tcattttctt gctgagcaca |
| 3601 | agagctggtg gcctgggctt aaatcttcag gcagctgata cagtggtcat ctttgacagc |
| 3661 | gactggaatc ctcatcagga tctgcaggcc caagaccgag ctcaccgcat cgggcagcag |
| 3721 | aacgaggtcc gggtactgag gctctgtacc gtgaacagcg tggaggaaaa gatcctcgcg |
| 3781 | gccgcaaaat acaagctgaa cgtggatcag aaagtgatcc aggcgggcat gtttgaccaa |
| 3841 | aagtcttcaa gccacgagcg gagggcattc ctgcaggcca tcttggagca tgaggaggaa |
| 3901 | aatgaggaag aagatgaagt accggacgat gagactctga accaaatgat tgctcgacga |
| 3961 | gaagaagaat ttgacctttt tatgcggatg gacatggacc ggcggaggga agatgcccgg |
| 4021 | aacccgaaac ggaagccccg tttaatggag gaggatgagc tgccctcctg gatcattaag |
| 4081 | gatgacgctg aagtagaaag gctcacctgt gaagaagagg aggagaaaat atttgggagg |
| 4141 | gggtcccgcc agcgccgtga cgtggactac agtgacgccc tcacggagaa gcagtggcta |
| 4201 | agggccatcg aagacggcaa tttggaggaa atggaagagg aagtacggct taagaagcga |
| 4261 | aaaagacgaa gaaatgtgga taaagatcct gcaaaagaag atgtggaaaa agctaagaag |
| 4321 | agaagaggcc gccctcccgc tgagaaactg tcaccaaatc cccccaaact gacaaagcag |
| 4381 | atgaacgcta tcatcgatac tgtgataaac tacaaagata ggtgtaacgt ggagaaggtg |
| 4441 | cccagtaatt ctcagttgga aatagaagga aacagttcag ggcgacagct cagtgaagtc |
| 4501 | ttcattcagt taccttcaag gaaagaatta ccagaatact atgaattaat taggaagcca |
| 4561 | gtggatttca aaaaaataaa ggaaaggatt cgtaatcata agtaccggag cctaggcgac |
| 4621 | ctggagaagg atgtcatgct tctctgtcac aacgctcaga cgttcaacct ggagggatcc |
| 4681 | cagatctatg aagactccat cgtcttacag tcagtgttta agagtgcccg gcagaaaatt |
| 4741 | gccaaagagg aagagagtga ggatgaaagc aatgaagagg aggaagagga agatgaagaa |
| 4801 | gagtcagagt ccgaggcaaa atcagtcaag gtgaaaatta agctcaataa aaaagatgac |
| 4861 | aaaggccggg acaaagggaa aggcaagaaa aggccaaatc gaggaaaagc caaacctgta |
| 4921 | gtgagcgatt ttgacagcga tgaggagcag gatgaacgtg aacagtcaga aggaagtggg |
| 4981 | acggatgatg agtgatcagt atggaccttt ttccttggta gaactgaatt ccttcctccc |
| 5041 | ctgtctcatt tctacccagt gagttcattt gtcatatagg cactgggttg tttctatatc |
| 5101 | atcatcgtct ataaactagc tttaggatag tgccagacaa acatatgata tcatggtgta |
| 5161 | aaaaacacac acatacacaa atatttgtaa catattgtga ccaaatgggc ctcaaagatt |
| 5221 | cagattgaaa caaacaaaaa gcttttgatg gaaaatatgt gggtggatag tatatttcta |
| 5281 | tgggtgggtc taatttggta acggtttgat tgtgcctggt tttatcacct gttcagatga |
| 5341 | gaagattttt gtcttttgta gcactgataa ccaggagaag ccattaaaag ccactggtta |
| 5401 | ttttattttt catcaggcaa ttttcgaggt ttttatttgt tcggtattgt ttttttacac |
| 5461 | tgtggtacat ataagcaact ttaataggtg ataaatgtac agtagttaga tttcacctgc |
| 5521 | atatacattt ttccatttta tgctctatga tctgaacaaa agctttttga attgtataag |
| 5581 | atttatgtct actgtaaaca ttgcttaatt tttttgctct tgatttaaaa aaaagttttg |
| 5641 | ttgaaagcgc tattgaatat tgcaatctat atagtgtatt ggatggcttc ttttgtcacc |
| 5701 | ctgatctcct atgttaccaa tgtgtatcgt ctccttctcc ctaaagtgta cttaatcttt |
| 5761 | gctttctttg cacaatgtct ttggttgcaa gtcataagcc tgaggcaaat aaaattccag |
| 5821 | taatttcgaa gaatgtggtg ttggtgcttt cctaataaag aaataattta gcttgacaaa |
| 5881 | aaaaaaaaaa aa |

SEQ ID NO: 174 Human SMARCA2 cDNA Sequence Variant 3 (NM_001289396.1,
CDS: 210-4982)

| | |
|---|---|
| 1 | tcagaagaaa gccccgagat cacagagacc cggcgagatc acagagaccc ggcctgaagg |
| 61 | aacgtggaaa gaccaatgta cctgttttga ccggttgcct ggagcaagaa gttccagttg |
| 121 | gggagaattt tcagaagata aagtcggaga ttgtggaaag acttgacttg cagcattact |
| 181 | ctactgactg gcagagacag gagaggtaga tgtccacgcc cacagaccct ggtgcgatgc |
| 241 | cccacccagg gccttcgccg gggcctgggc cttcccctgg gccaattctt gggcctagtc |
| 301 | caggaccagg accatcccca ggttccgtcc acagcatgat ggggccaagt cctggacctc |
| 361 | caagtgtctc ccatcctatg ccgacgatgg ggtccacaga cttcccacag gaaggcatgc |
| 421 | atcaaatgca taagcccatc gatggtatac atgacaaggg gattgtagaa gacatccatt |
| 481 | gtggatccat gaagggcact ggtatgcgac cacctcaccc aggcatgggc cctccccaga |
| 541 | gtccaatgga tcaacacagc caaggttata tgtcaccaca cccatctcca ttaggagccc |
| 601 | cagagcacgt ctccagccct atgtctggag gaggcccaac tccacctcag atgccaccaa |
| 661 | gccagccggg ggccctcatc ccaggtgatc cgcaggccat gagccagccc aacagaggtc |
| 721 | cctcaccttt cagtcctgtc cagctgcatc agcttcgagc tcagatttta gcttataaaa |
| 781 | tgctggcccg aggccagccc ctccccgaaa cgctgcagct tgcagtccag gggaaaagga |
| 841 | cgttgcctgg cttgcagcaa caacagcagc agcaacagca gcagcagcag cagcagcagc |
| 901 | agcagcagca gcagcaacag cagccgcagc agcagccgcc gcaaccacag acgcagcaac |
| 961 | aacagcagcc ggcccttgtt aactacaaca gaccatctgg cccggggccg gagctgagcg |
| 1021 | gcccgagcac cccgcagaag ctgccggtgc ccgcgcccgg cggccggccc tcgcccgcgc |
| 1081 | cccccgcagc cgcgcagccg cccgcggccg cagtgcccgg gccctcagtg ccgcagccgg |
| 1141 | ccccggggca gccctcgccc gtcctccagc tgcagcagaa gcagagccgc atcagcccca |
| 1201 | tccagaaacc gcaaggcctg gaccccgtgg aaattctgca agagcgggaa tacagacttc |
| 1261 | aggcccgcat agctcatagg atacaagaac tggaaaatct gcctggctct ttgccaccag |
| 1321 | atttaagaac caaagcaacc gtggaactaa aagcacttcg gttactcaat ttccagcgtc |
| 1381 | agctgagaca ggaggtggtg gcctgcatgc gcagggacac gaccctggag acggctctca |
| 1441 | actccaaagc atacaaacgg agcaagcgcc agactctgag agaagctcgc atgaccgaga |
| 1501 | agctggagaa gcagcagaag attgagcagg agaggaaacg ccgtcagaaa caccaggaat |
| 1561 | acctgaacag tattttgcaa catgcaaaag attttaagga atatcatcgg tctgtggccg |
| 1621 | gaaagatcca gaagctctcc aaagcagtgg caacttggca tgccaacact gaaagagagc |
| 1681 | agaagaagga gacagagcgg attgaaaagg agagaatgcg gcgactgatg gctgaagatg |
| 1741 | aggagggtta tagaaaactg attgatcaaa agaaagacag gcgtttagct taccttttgc |
| 1801 | agcagaccga tgagtatgta gccaatctga ccaatctggt ttgggagcac aagcaagccc |
| 1861 | aggcagccaa agagaagaag aagaggagga ggaggaagaa gaaggctgag gagaatgcag |
| 1921 | agggtgggga gtctgccctg ggaccggatg gagagcccat agatgagagc agccagatga |
| 1981 | gtgacctccc tgtcaaagtg actcacacag aaaccggcaa ggttctgttc ggaccagaag |
| 2041 | cacccaaagc aagtcagctg gacgcctggc tggaaatgaa tcctggttat gaagttgccc |
| 2101 | ctagatctga cagtgaagag agtgattctg attatgagga agaggatgag gaagaagagt |
| 2161 | ccagtaggca ggaaaccgaa gagaaaatac tcctggatcc aaatagcgaa gaagtttctg |
| 2221 | agaaggatgc taagcagatc attgagacag ctaagcaaga cgtggatgat gaatacagca |
| 2281 | tgcagtacag tgccaggggc tcccagtcct actacaccgt ggctcatgcc atctcggaga |
| 2341 | gggtggagaa acagtctgcc ctcctaatta atgggaccct aaagcattac cagctccagg |
| 2401 | gcctggaatg gatggtttcc ctgtataata acaacttgaa cggaatctta gccgatgaaa |
| 2461 | tggggcttgg aaagaccata cagaccattg cactcatcac ttatctgatg gagcacaaaa |
| 2521 | gactcaatgg cccctatctc atcattgttc ccctttcgac tctatctaac tggacatatg |
| 2581 | aatttgacaa atgggctcct tctgtggtga agatttctta caagggtact cctgccatgc |
| 2641 | gtcgctccct tgtcccccag ctacggagtg gcaaattcaa tgtcctcttg actacttatg |
| 2701 | agtatattat aaaagacaag cacattcttg caaagattcg gtggaaatac atgatagtgg |
| 2761 | acgaaggcca ccgaatgaag aatcaccact gcaagctgac tcaggtcttg aacactcact |
| 2821 | atgtggcccc cagaaggatc ctcttgactg ggaccccgct gcagaataag ctccctgaac |
| 2881 | tctgggccct cctcaacttc ctcctcccaa caatttttaa gagctgcagc acatttgaac |
| 2941 | aatggttcaa tgctccattt gccatgactg gtgaaagggt ggacttaaat gaagaagaaa |
| 3001 | ctatattgat catcaggcgt ctacataagg tgttaagacc atttttacta aggagactga |
| 3061 | agaaagaagt tgaatcccag cttcccgaaa aagtggaata tgtgatcaag tgtgacatgt |
| 3121 | cagctctgca gaagattctg tatcgccata tgcaagccaa ggggatcctt ctcacagatg |
| 3181 | gttctgagaa agataagaag gggaaaggag gtgctaagac acttatgaac actattatgc |
| 3241 | agttgagaaa aatctgcaac cacccatata tgtttcagca cattgaggaa tcctttgctg |
| 3301 | aacacctagg ctattcaaat ggggtcatca atggggctga actgtatcgg gcctcaggga |
| 3361 | agtttgagct gcttgatcgt attctgccaa aattgagagc gactaatcac cgagtgctgc |
| 3421 | ttttctgcca gatgacatct ctcatgacca tcatggagga ttattttgct tttcggaact |
| 3481 | tcctttacct acgccttgat ggcaccacca agtctgaaga tcgtgctgct ttgctgaaga |
| 3541 | aattcaatga acctggatcc cagtatttca ttttcttgct gagcacaaga gctggtggcc |
| 3601 | tgggcttaaa tcttcaggca gctgatacag tggtcatctt tgacagcgac tggaatcctc |
| 3661 | atcaggatct gcaggcccaa gaccgagctc accgcatcgg gcagcagaac gaggtccggg |
| 3721 | tactgaggct ctgtaccgtg aacagcgtgg aggaaaagat cctcgcggcc gcaaaataca |
| 3781 | agctgaacgt ggatcagaaa gtgatccagg cgggcatgtt tgaccaaaag tcttcaagcc |
| 3841 | acgagcggag ggcattcctg caggccatct tggagcatga ggaggaaaat gaggaagaag |
| 3901 | atgaagtacc ggacgatgag actctgaacc aaatgattgc tcgacgagaa gaagaatttg |
| 3961 | acctttttat gcggatggac atggaccggc ggagggaaga tgcccggaac ccgaaacgga |
| 4021 | agccccgttt aatggaggag gatgagctgc cctcctggat cattaaggat gacgctgaag |
| 4081 | tagaaaggct cacctgtgaa gaagaggagg agaaaatatt tgggaggggg tcccgccagc |
| 4141 | gccgtgacgt ggactacagt gacgccctca cggagaagca gtggctaagg gccatcgaag |
| 4201 | acggcaattt ggaggaaatg gaagaggaag tacggcttaa gaagcgaaaa agacgaagaa |
| 4261 | atgtggataa agatcctgca aaagaagatg tggaaaaagc taagaagaga agaggccgcc |
| 4321 | ctcccgctga gaaactgtca ccaaatcccc ccaaactgac aaagcagatg aacgctatca |
| 4381 | tcgatactgt gataaactac aaagataggt gtaacgtgga gaaggtgccc agtaattctc |
| 4441 | agttggaaat agaaggaaac agttcagggc gacagctcag tgaagtcttc attcagttac |
| 4501 | cttcaaggaa agaattacca gaatactatg aattaattag gaagccagtg gatttcaaaa |
| 4561 | aaataaagga aaggattcgt aatcataagt accggagcct aggcgacctg gagaaggatg |
| 4621 | tcatgcttct ctgtcacaac gctcagacgt tcaacctgga gggatcccag atctatgaag |
| 4681 | actccatcgt cttacagtca gtgtttaaga gtgcccggca gaaaattgcc aaagaggaag |
| 4741 | agagtgagga tgaaagcaat gaagaggagg aagaggaaga tgaagaagag tcagagtccg |
| 4801 | aggcaaaatc agtcaaggtg aaaattaagc tcaataaaaa agatgacaaa ggccgggaca |
| 4861 | aagggaaagg caagaaaagg ccaaatcgag gaaaagccaa acctgtagtg agcgattttg |
| 4921 | acagcgatga ggagcaggat gaacgtgaac agtcagaagg aagtgggacg gatgatgagt |
| 4981 | gatcagtatg gacctttttc cttggtagaa ctgaattcct tcctcccctg tctcatttct |
| 5041 | acccagtgag ttcatttgtc atataggcac tgggttgttt ctatatcatc atcgtctata |
| 5101 | aactagcttt aggatagtgc cagacaaaca tatgatatca tggtgtaaaa aacacacaca |
| 5161 | tacacaaata tttgtaacat attgtgacca aatgggcctc aaagattcag attgaaacaa |
| 5221 | acaaaaagct tttgatggaa aatatgtggg tggatagtat atttctatgg gtgggtctaa |
| 5281 | tttggtaacg gtttgattgt gcctggtttt atcacctgtt cagatgagaa gatttttgtc |
| 5341 | ttttgtagca ctgataacca ggagaagcca ttaaaagcca ctggttattt tatttttcat |
| 5401 | caggcaattt tcgaggtttt tatttgttcg gtattgtttt tttacactgt ggtacatata |
| 5461 | agcaacttta ataggtgata aatgtacagt agttagattt cacctgcata tacatttttc |
| 5521 | cattttatgc tctatgatct gaacaaaagc tttttgaatt gtataagatt tatgtctact |
| 5581 | gtaaacattg cttaattttt ttgctcttga tttaaaaaaa agttttgttg aaagcgctat |
| 5641 | tgaatattgc aatctatata gtgtattgga tggcttcttt tgtcaccctg atctcctatg |
| 5701 | ttaccaatgt gtatcgtctc cttctcccta aagtgtactt aatctttgct ttctttgcac |
| 5761 | aatgtctttg gttgcaagtc ataagcctga ggcaaataaa attccagtaa tttcgaagaa |
| 5821 | tgtggtgttg gtgctttcct aataaagaaa taatttagct tgacaaaaaa aaaaaaaaa |

SEQ ID NO: 175 Human SMARCA2 Amino Acid Sequence Isoform B
(NP_620614.2)

| | |
|---|---|
| 1 | mstptdpgam phpgpspgpg pspgpilgps pgpgpspgsv hsmmgpspgp psvshpmptm |
| 61 | gstdfpqegm hqmhkpidgi hdkgivedih cgsmkgtgmr pphpgmgppq spmdqhsqgy |
| 121 | msphpsplga pehvsspmsg ggptppqmpp sqpgalipgd pqamsqpnrg pspfspvqlh |
| 181 | qlraqilayk mlargqplpe tlqlavqgkr tlpqlqqqqq qqqqqqqqqq qqqqqqqqpq |
| 241 | qqppqpqtqq qqqpalvnyn rpsgpgpels gpstpqklpv papggrpspa ppaaaqppaa |
| 301 | avpgpsvpqp apgqpspvlq lqqkqsrisp iqkpqgldpv eilqereyrl qariahriqe |
| 361 | lenlpgslpp dlrtkatvel kalrllnfqr qlrqevvacm rrdttletal nskaykrskr |
| 421 | qtlrearmte klekqqkieq erkrrqkhqe ylnsilqhak dfkeyhrsva gkiqklskav |
| 481 | atwhantere qkketeriek ermrrlmaed eegyrklidq kkdrrlayll qqtdeyvanl |
| 541 | tnlvwehkqa qaakekkkrr rrkkkaeena eggesalgpd gepidessqm sdlpvkvtht |
| 601 | etgkvlfgpe apkasqldaw lemnpgyeva prsdseesds dyeeedeeee ssrqeteeki |
| 661 | lldpnseevs ekdakqiiet akqdvddeys mqysargsqs yytvahaise rvekqsalli |
| 721 | ngtlkhyqlq glewmvslyn nnlngilade mglgktiqti alitylmehk ringpyliiv |
| 781 | plstlsnwty efdkwapsvv kisykgtpam rrslvpqlrs gkfnvlltty eyiikdkhil |
| 841 | akirwkymiv deghrmknhh ckltqvlnth yvaprrillt gtplqnklpe lwallnfllp |
| 901 | tifkscstfe qwfnapfamt gervdlneee tiliirrlhk vlrpfllrrl kkevesqlpe |
| 961 | kveyvikcdm salqkilyrh mqakgilltd gsekdkkgkg gaktlmntim qlrkicnhpy |
| 1021 | mfqhieesfa ehlgysngvi ngaelyrasg kfelldrilp klratnhrvl lfcqmtslmt |
| 1081 | imedyfafrn flylrldgtt ksedraallk kfnepgsqyf ifllstragg 1glnlqaadt |
| 1141 | vvifdsdwnp hqdlqaqdra hrigqqnevr vlrlctvnsv eekilaaaky klnvdqkviq |
| 1201 | agmfdqksss herraflqai leheeeneee devpddetln qmiarreeef dlfmrmdmdr |
| 1261 | rredarnpkr kprlmeedel pswiikddae verltceeee ekifgrgsrq rrdvdysdal |
| 1321 | tekqwlraie dgnleemeee vrlkkrkrrr nvdkdpaked vekakkrrgr ppaeklspnp |
| 1381 | pkltkqmnai idtvinykds sgrqlsevfi qlpsrkelpe yyelirkpvd fkkikerirn |
| 1441 | hkyrslgdle kdvmllchna qtfnlegsqi yedsivlqsv fksarqkiak eeesedesne |
| 1501 | eeeeedeees eseaksvkvk iklnkkddkg rdkgkgkkrp nrgkakpvvs dfdsdeeqde |
| 1561 | reqsegsgtd de |

SEQ ID NO: 176 Human SMARCA2 cDNA Sequence Variant 2 (NM_139045.3,
CDS: 223-4941)

| | |
|---|---|
| 1 | gcgtcttccg gcgcccgcgg aggaggcgag ggtgggacgc tgggcggagc ccgagtttag |
| 61 | gaagaggagg ggacggctgt catcaatgaa gtcatattca taatctagtc ctctctccct |
| 121 | ctgtttctgt actctgggtg actcagagag ggaagagatt cagccagcac actcctcgcg |
| 181 | agcaagcatt actctactga ctggcagaga caggagaggt agatgtccac gcccacagac |
| 241 | cctggtgcga tgccccaccc agggccttcg ccggggcctg ggccttcccc tgggccaatt |
| 301 | cttgggccta gtccaggacc aggaccatcc ccaggttccg tccacagcat gatggggcca |
| 361 | agtcctggac ctccaagtgt ctcccatcct atgccgacga tggggtccac agacttccca |
| 421 | caggaaggca tgcatcaaat gcataagccc atcgatggta tacatgacaa ggggattgta |
| 481 | gaagacatcc attgtggatc catgaagggc actggtatgc gaccacctca cccaggcatg |
| 541 | ggccctcccc agagtccaat ggatcaacac agccaaggtt atatgtcacc acacccatct |
| 601 | ccattaggag ccccagagca cgtctccagc cctatgtctg gaggaggccc aactccacct |
| 661 | cagatgccac caagccagcc gggggccctc atcccaggtg atccgcaggc catgagccag |
| 721 | cccaacagag gtccctcacc tttcagtcct gtccagctgc atcagcttcg agctcagatt |
| 781 | ttagcttata aaatgctggc ccgaggccag cccctccccg aaacgctgca gcttgcagtc |
| 841 | caggggaaaa ggacgttgcc tggcttgcag caacaacagc agcagcaaca gcagcagcag |
| 901 | cagcagcagc agcagcagca gcagcagcaa cagcagccgc agcagcagcc gccgcaacca |
| 961 | cagacgcagc aacaacagca gccggccctt gttaactaca acagaccatc tggcccgggg |
| 1021 | ccggagctga gcggcccgag caccccgcag aagctgccgg tgcccgcgcc cggcggccgg |
| 1081 | ccctcgcccg cgccccccgc agccgcgcag ccgcccgcgg ccgcagtgcc cgggccctca |
| 1141 | gtgccgcagc cggccccggg gcagccctcg cccgtcctcc agctgcagca gaagcagagc |
| 1201 | cgcatcagcc ccatccagaa accgcaaggc ctggaccccg tggaaattct gcaagagcgg |
| 1261 | gaatacagac ttcaggcccg catagctcat aggatacaag aactggaaaa tctgcctggc |
| 1321 | tctttgccac cagatttaag aaccaaagca accgtggaac taaaagcact tcggttactc |
| 1381 | aatttccagc gtcagctgag acaggaggtg gtggcctgca tgcgcaggga cacgaccctg |
| 1441 | gagacggctc tcaactccaa agcatacaaa cggagcaagc gccagactct gagagaagct |
| 1501 | cgcatgaccg agaagctgga gaagcagcag aagattgagc aggagaggaa acgccgtcag |
| 1561 | aaacaccagg aatacctgaa cagtattttg caacatgcaa aagattttaa ggaatatcat |
| 1621 | cggtctgtgg ccggaaagat ccagaagctc tccaaagcag tggcaacttg gcatgccaac |
| 1681 | actgaaagag agcagaagaa ggagacagag cggattgaaa aggagagaat gcggcgactg |
| 1741 | atggctgaag atgaggaggg ttatagaaaa ctgattgatc aaaagaaaga caggcgttta |
| 1801 | gcttaccttt tgcagcagac cgatgagtat gtagccaatc tgaccaatct ggtttgggag |
| 1861 | cacaagcaag cccaggcagc caaagagaag aagaagagga ggaggaggaa gaagaaggct |
| 1921 | gaggagaatg cagagggtgg ggagtctgcc ctgggaccgg atggagagcc catagatgag |
| 1981 | agcagccaga tgagtgacct ccctgtcaaa gtgactcaca cagaaaccgg caaggttctg |
| 2041 | ttcggaccag aagcacccaa agcaagtcag ctggacgcct ggctggaaat gaatcctggt |
| 2101 | tatgaagttg cccctagatc tgacagtgaa gagagtgatt ctgattatga ggaagaggat |
| 2161 | gaggaagaag agtccagtag gcaggaaacc gaagagaaaa tactcctgga tccaaatagc |
| 2221 | gaagaagttt ctgagaagga tgctaagcag atcattgaga cagctaagca agacgtggat |
| 2281 | gatgaataca gcatgcagta cagtgccagg ggctcccagt cctactacac cgtggctcat |
| 2341 | gccatctcgg agagggtgga gaaacagtct gccctcctaa ttaatgggac cctaaagcat |
| 2401 | taccagctcc agggcctgga atggatggtt tccctgtata ataacaactt gaacggaatc |
| 2461 | ttagccgatg aaatggggct tggaaagacc atacagacca ttgcactcat cacttatctg |
| 2521 | atggagcaca aaagactcaa tggcccctat ctcatcattg ttcccctttc gactctatct |
| 2581 | aactggacat atgaatttga caaatgggct ccttctgtgg tgaagatttc ttacaagggt |
| 2641 | actcctgcca tgcgtcgctc ccttgtcccc cagctacgga gtggcaaatt caatgtcctc |
| 2701 | ttgactactt atgagtatat tataaaagac aagcacattc ttgcaaagat tcggtggaaa |
| 2761 | tacatgatag tggacgaagg ccaccgaatg aagaatcacc actgcaagct gactcaggtc |
| 2821 | ttgaacactc actatgtggc ccccagaagg atcctcttga ctgggacccc gctgcagaat |
| 2881 | aagctccctg aactctgggc cctcctcaac ttcctcctcc caacaatttt taagagctgc |
| 2941 | agcacatttg aacaatggtt caatgctcca tttgccatga ctggtgaaag ggtggactta |
| 3001 | aatgaagaag aaactatatt gatcatcagg cgtctacata aggtgttaag accattttta |
| 3061 | ctaaggagac tgaagaaaga agttgaatcc cagcttcccg aaaaagtgga atatgtgatc |
| 3121 | aagtgtgaca tgtcagctct gcagaagatt ctgtatcgcc atatgcaagc caaggggatc |
| 3181 | cttctcacag atggttctga gaaagataag aaggggaaag gaggtgctaa gacacttatg |
| 3241 | aacactatta tgcagttgag aaaaatctgc aaccacccat atatgtttca gcacattgag |
| 3301 | gaatcctttg ctgaacacct aggctattca aatggggtca tcaatggggc tgaactgtat |
| 3361 | cgggcctcag ggaagtttga gctgcttgat cgtattctgc caaaattgag agcgactaat |
| 3421 | caccgagtgc tgcttttctg ccagatgaca tctctcatga ccatcatgga ggattatttt |
| 3481 | gcttttcgga acttccttta cctacgcctt gatggcacca ccaagtctga agatcgtgct |
| 3541 | gctttgctga agaaattcaa tgaacctgga tcccagtatt tcattttctt gctgagcaca |
| 3601 | agagctggtg gcctgggctt aaatcttcag gcagctgata cagtggtcat ctttgacagc |
| 3661 | gactggaatc ctcatcagga tctgcaggcc caagaccgag ctcaccgcat cgggcagcag |
| 3721 | aacgaggtcc gggtactgag gctctgtacc gtgaacagcg tggaggaaaa gatcctcgcg |
| 3781 | gccgcaaaat acaagctgaa cgtggatcag aaagtgatcc aggcgggcat gtttgaccaa |
| 3841 | aagtcttcaa gccacgagcg gagggcattc ctgcaggcca tcttggagca tgaggaggaa |
| 3901 | aatgaggaag aagatgaagt accggacgat gagactctga accaaatgat tgctcgacga |
| 3961 | gaagaagaat ttgacctttt tatgcggatg gacatggacc ggcggaggga agatgcccgg |
| 4021 | aacccgaaac ggaagccccg tttaatggag gaggatgagc tgccctcctg gatcattaag |
| 4081 | gatgacgctg aagtagaaag gctcacctgt gaagaagagg aggagaaaat atttgggagg |
| 4141 | gggtcccgcc agcgccgtga cgtggactac agtgacgccc tcacggagaa gcagtggcta |
| 4201 | agggccatcg aagacggcaa tttggaggaa atggaagagg aagtacggct taagaagcga |
| 4261 | aaaagacgaa gaaatgtgga taaagatcct gcaaaagaag atgtggaaaa agctaagaag |
| 4321 | agaagaggcc gccctcccgc tgagaaactg tcaccaaatc cccccaaact gacaaagcag |
| 4381 | atgaacgcta tcatcgatac tgtgataaac tacaaagata gttcagggcg acagctcagt |
| 4441 | gaagtcttca ttcagttacc ttcaaggaaa gaattaccag aatactatga attaattagg |
| 4501 | aagccagtgg atttcaaaaa aataaaggaa aggattcgta atcataagta ccggagccta |
| 4561 | ggcgacctgg agaaggatgt catgcttctc tgtcacaacg ctcagacgtt caacctggag |
| 4621 | ggatcccaga tctatgaaga ctccatcgtc ttacagtcag tgtttaagag tgcccggcag |
| 4681 | aaaattgcca aagaggaaga gagtgaggat gaaagcaatg aagaggagga agaggaagat |
| 4741 | gaagaagagt cagagtccga ggcaaaatca gtcaaggtga aaattaagct caataaaaaa |
| 4801 | gatgacaaag gccgggacaa agggaaaggc aagaaaaggc caaatcgagg aaaagccaaa |
| 4861 | cctgtagtga gcgattttga cagcgatgag gagcaggatg aacgtgaaca gtcagaagga |
| 4921 | agtgggacgg atgatgagtg atcagtatgg acctttttcc ttggtagaac tgaattcctt |
| 4981 | cctcccctgt ctcatttcta cccagtgagt tcatttgtca tataggcact gggttgtttc |
| 5041 | tatatcatca tcgtctataa actagcttta ggatagtgcc agacaaacat atgatatcat |
| 5101 | ggtgtaaaaa acacacacat acacaaatat ttgtaacata ttgtgaccaa atgggcctca |
| 5161 | aagattcaga ttgaaacaaa caaaaagctt ttgatggaaa atatgtgggt ggatagtata |
| 5221 | tttctatggg tgggtctaat ttggtaacgg tttgattgtg cctggtttta tcacctgttc |
| 5281 | agatgagaag atttttgtct tttgtagcac tgataaccag gagaagccat taaaagccac |
| 5341 | tggttatttt atttttcatc aggcaatttt cgaggttttt atttgttcgg tattgttttt |
| 5401 | ttacactgtg gtacatataa gcaactttaa taggtgataa atgtacagta gttagatttc |
| 5461 | acctgcatat acatttttcc attttatgct ctatgatctg aacaaaagct ttttgaattg |
| 5521 | tataagattt atgtctactg taaacattgc ttaatttttt tgctcttgat ttaaaaaaaa |
| 5581 | gttttgttga aagcgctatt gaatattgca atctatatag tgtattggat ggcttctttt |
| 5641 | gtcaccctga tctcctatgt taccaatgtg tatcgtctcc ttctccctaa agtgtactta |
| 5701 | atctttgctt tctttgcaca atgtctttgg ttgcaagtca taagcctgag gcaaataaaa |
| 5761 | ttccagtaat ttcgaagaat gtggtgttgg tgctttccta ataaagaaat aatttagctt |
| 5821 | gacaaaaaaa aaaaaaaa |

SEQ ID NO: 177 Human SMARCA2 Amino Acid Sequence Isoform C
(NP_001276326.1)

| | |
|---|---|
| 1 | mstptdpgam phpgpspgpg pspgpilgps pgpgpspgsv hsmmgpspgp psvshpmptm |
| 61 | gstdfpqegm hqmhkpidgi hdkgivedih cgsmkgtgmr pphpgmgppq spmdqhsqgy |
| 121 | msphpsplga pehvsspmsg ggptppqmpp sqpgalipgd pqamsqpnrg pspfspvqlh |
| 181 | qlraqilayk mlargqplpe tlglavqgkr tlpglqqqqq qqqqqqqqqq qqqqqqqqpq |
| 241 | qqppqpqtqq qqqpalvnyn rpsgpgpels gpstpqklpv papggrpspa ppaaaqppaa |
| 301 | avpgpsvpqp apgqpspvlq lqqkqsrisp iqkpqgldpv eilqereyrl qariahriqe |
| 361 | lenlpgslpp dlrtkatvel kalrllnfqr qlrqevvacm rrdttletal nskaykrskr |
| 421 | qtlrearmte klekqqkieq erkrrqkhqe ylnsilqhak dfkeyhrsva gkiqklskav |
| 481 | atwhantere qkketeriek ermrrlmaed eegyrklidq kkdrrlayll qqtdeyvanl |
| 541 | tnlvwehkqa qaakekkkrr rrkkkaeena eggesalgpd gepidessqm sdlpvkvtht |
| 601 | etgkvlfgpe apkasqldaw lemnpgyeva prsdseesds dyeeedeeee ssrqeteeki |
| 661 | lldpnseevs ekdakqiiet akqdvddeys mqysargsqs yytvahaise rvekqsalli |
| 721 | ngtlkhyqlq glewmvslyn nnlngilade mglgktiqti alitylmehk rlngpyliiv |
| 781 | plstlsnwty efdkwapsvv kisykgtpam rrslvpqlrs gkfnvlltty eyiikdkhil |
| 841 | akirwkymiv deghrmknhh ckltqvdlne eetiliirrl hkvlrpfllr rlkkevesql |
| 901 | pekveyvikc dmsalqkily rhmqakgill tdgsekdkkg kggaktlmnt imqlrkicnh |
| 961 | pymfqhiees faehlgysng vingaelyra sgkfelldri lpklratnhr vllfcqmtsl |
| 1021 | mtimedyfaf rnflylrldg ttksedraal lkkfnepgsq yfifllstra gglglnlqaa |
| 1081 | dtvvifdsdw nphqdlqaqd rahrigqqne vrvlrlctvn sveekilaaa kyklnvdqkv |
| 1141 | iqagmfdqks ssherraflq aileheeene eedevpddet lnqmiarree efdlfmrmdm |
| 1201 | drrredarnp krkprlmeed elpswiikdd aeverltcee eeekifgrgs rqrrdvdysd |
| 1261 | altekqwlra iedgnleeme eevrlkkrkr rrnvdkdpak edvekakkrr grppaeklsp |
| 1321 | nppkltkqmn aiidtvinyk dssgrqlsev fiqlpsrkel peyyelirkp vdfkkikeri |
| 1381 | rnhkyrslgd lekdvmilch naqtfnlegs qiyedsivlq svfksarqki akeeesedes |
| 1441 | neeeeeedee eseseaksvk vkiklnkkdd kgrdkgkgkk rpnrgkakpv vsdfdsdeeq |
| 1501 | dereqsegsg tdde |

SEQ ID NO: 178 Human SMARCA2 cDNA Sequence Variant 4 (NM_001289397.1,
CDS: 223-4767)

| | |
|---|---|
| 1 | gcgtcttccg gcgcccgcgg aggaggcgag ggtgggacgc tgggcggagc ccgagtttag |
| 61 | gaagaggagg ggacggctgt catcaatgaa gtcatattca taatctagtc ctctctccct |
| 121 | ctgtttctgt actctgggtg actcagagag ggaagagatt cagccagcac actcctcgcg |
| 181 | agcaagcatt actctactga ctggcagaga caggagaggt agatgtccac gcccacagac |
| 241 | cctggtgcga tgccccaccc agggccttcg ccggggcctg ggccttcccc tgggccaatt |
| 301 | cttgggccta gtccaggacc aggaccatcc ccaggttccg tccacagcat gatggggcca |
| 361 | agtcctggac ctccaagtgt ctcccatcct atgccgacga tggggtccac agacttccca |
| 421 | caggaaggca tgcatcaaat gcataagccc atcgatggta tacatgacaa ggggattgta |
| 481 | gaagacatcc attgtggatc catgaagggc actggtatgc gaccacctca cccaggcatg |
| 541 | ggccctcccc agagtccaat ggatcaacac agccaaggtt atatgtcacc acacccatct |
| 601 | ccattaggag ccccagagca cgtctccagc cctatgtctg gaggaggccc aactccacct |
| 661 | cagatgccac caagccagcc gggggccctc atcccaggtg atccgcaggc catgagccag |
| 721 | cccaacagag gtccctcacc tttcagtcct gtccagctgc atcagcttcg agctcagatt |
| 781 | ttagcttata aaatgctggc ccgaggccag cccctccccg aaacgctgca gcttgcagtc |
| 841 | caggggaaaa ggacgttgcc tggcttgcag caacaacagc agcagcaaca gcagcagcag |
| 901 | cagcagcagc agcagcagca gcagcagcaa cagcagccgc agcagcagcc gccgcaacca |
| 961 | cagacgcagc aacaacagca gccggccctt gttaactaca acagaccatc tggcccgggg |
| 1021 | ccggagctga gcggcccgag caccccgcag aagctgccgg tgcccgcgcc cggcggccgg |
| 1081 | ccctcgcccg cgccccccgc agccgcgcag ccgcccgcgg ccgcagtgcc cgggccctca |
| 1141 | gtgccgcagc cggccccggg gcagccctcg cccgtcctcc agctgcagca gaagcagagc |
| 1201 | cgcatcagcc ccatccagaa accgcaaggc ctggaccccg tggaaattct gcaagagcgg |
| 1261 | gaatacagac ttcaggcccg catagctcat aggatacaag aactggaaaa tctgcctggc |
| 1321 | tctttgccac cagatttaag aaccaaagca accgtggaac taaaagcact tcggttactc |
| 1381 | aatttccagc gtcagctgag acaggaggtg gtggcctgca tgcgcaggga cacgaccctg |
| 1441 | gagacggctc tcaactccaa agcatacaaa cggagcaagc gccagactct gagagaagct |
| 1501 | cgcatgaccg agaagctgga gaagcagcag aagattgagc aggagaggaa acgccgtcag |
| 1561 | aaacaccagg aatacctgaa cagtattttg caacatgcaa aagattttaa ggaatatcat |
| 1621 | cggtctgtgg ccggaaagat ccagaagctc tccaaagcag tggcaacttg gcatgccaac |
| 1681 | actgaaagag agcagaagaa ggagacagag cggattgaaa aggagagaat gcggcgactg |
| 1741 | atggctgaag atgaggaggg ttatagaaaa ctgattgatc aaaagaaaga caggcgttta |
| 1801 | gcttaccttt tgcagcagac cgatgagtat gtagccaatc tgaccaatct ggtttgggag |
| 1861 | cacaagcaag cccaggcagc caaagagaag aagaagagga ggaggaggaa gaagaaggct |
| 1921 | gaggagaatg cagagggtgg ggagtctgcc ctgggaccgg atggagagcc catagatgag |
| 1981 | agcagccaga tgagtgacct ccctgtcaaa gtgactcaca cagaaaccgg caaggttctg |
| 2041 | ttcggaccag aagcacccaa agcaagtcag ctggacgcct ggctggaaat gaatcctggt |
| 2101 | tatgaagttg cccctagatc tgacagtgaa gagagtgatt ctgattatga ggaagaggat |
| 2161 | gaggaagaag agtccagtag gcaggaaacc gaagagaaaa tactcctgga tccaaatagc |
| 2221 | gaagaagttt ctgagaagga tgctaagcag atcattgaga cagctaagca agacgtggat |
| 2281 | gatgaataca gcatgcagta cagtgccagg ggctcccagt cctactacac cgtggctcat |
| 2341 | gccatctcgg agagggtgga gaaacagtct gccctcctaa ttaatgggac cctaaagcat |
| 2401 | taccagctcc agggcctgga atggatggtt tccctgtata ataacaactt gaacggaatc |
| 2461 | ttagccgatg aaatggggct tggaaagacc atacagacca ttgcactcat cacttatctg |
| 2521 | atggagcaca aaagactcaa tggcccctat ctcatcattg ttcccctttc gactctatct |
| 2581 | aactggacat atgaatttga caaatgggct ccttctgtgg tgaagatttc ttacaagggt |
| 2641 | actcctgcca tgcgtcgctc ccttgtcccc cagctacgga gtggcaaatt caatgtcctc |
| 2701 | ttgactactt atgagtatat tataaaagac aagcacattc ttgcaaagat tcggtggaaa |
| 2761 | tacatgatag tggacgaagg ccaccgaatg aagaatcacc actgcaagct gactcaggtg |
| 2821 | gacttaaatg aagaagaaac tatattgatc atcaggcgtc tacataaggt gttaagacca |
| 2881 | tttttactaa ggagactgaa gaaagaagtt gaatcccagc ttcccgaaaa agtggaatat |
| 2941 | gtgatcaagt gtgacatgtc agctctgcag aagattctgt atcgccatat gcaagccaag |
| 3001 | gggatccttc tcacagatgg ttctgagaaa gataagaagg ggaaaggagg tgctaagaca |
| 3061 | cttatgaaca ctattatgca gttgagaaaa atctgcaacc acccatatat gtttcagcac |
| 3121 | attgaggaat cctttgctga acacctaggc tattcaaatg gggtcatcaa tggggctgaa |
| 3181 | ctgtatcggg cctcagggaa gtttgagctg cttgatcgta ttctgccaaa attgagagcg |
| 3241 | actaatcacc gagtgctgct tttctgccag atgacatctc tcatgaccat catggaggat |
| 3301 | tattttgctt ttcggaactt cctttaccta cgccttgatg gcaccaccaa gtctgaagat |
| 3361 | cgtgctgctt tgctgaagaa attcaatgaa cctggatccc agtatttcat tttcttgctg |
| 3421 | agcacaagag ctggtggcct gggcttaaat cttcaggcag ctgatacagt ggtcatcttt |
| 3481 | gacagcgact ggaatcctca tcaggatctg caggcccaag accgagctca ccgcatcggg |
| 3541 | cagcagaacg aggtccgggt actgaggctc tgtaccgtga acagcgtgga ggaaaagatc |
| 3601 | ctcgcggccg caaaatacaa gctgaacgtg gatcagaaag tgatccaggc gggcatgttt |
| 3661 | gaccaaaagt cttcaagcca cgagcggagg gcattcctgc aggccatctt ggagcatgag |
| 3721 | gaggaaaatg aggaagaaga tgaagtaccg gacgatgaga ctctgaacca aatgattgct |
| 3781 | cgacgagaag aagaatttga cctttttatg cggatggaca tggaccggcg gagggaagat |
| 3841 | gcccggaacc cgaaacggaa gccccgttta atggaggagg atgagctgcc ctcctggatc |
| 3901 | attaaggatg acgctgaagt agaaaggctc acctgtgaag aagaggagga gaaaatattt |
| 3961 | gggagggggt cccgccagcg ccgtgacgtg gactacagtg acgccctcac ggagaagcag |
| 4021 | tggctaaggg ccatcgaaga cggcaatttg gaggaaatgg aagaggaagt acggcttaag |
| 4081 | aagcgaaaaa gacgaagaaa tgtggataaa gatcctgcaa aagaagatgt ggaaaaagct |
| 4141 | aagaagagaa gaggccgccc tcccgctgag aaactgtcac caaatccccc caaactgaca |
| 4201 | aagcagatga acgctatcat cgatactgtg ataaactaca aagatagttc agggcgacag |
| 4261 | ctcagtgaag tcttcattca gttaccttca aggaaagaat taccagaata ctatgaatta |
| 4321 | attaggaagc cagtggattt caaaaaaata aaggaaagga ttcgtaatca taagtaccgg |
| 4381 | agcctaggcg acctggagaa ggatgtcatg cttctctgtc acaacgctca gacgttcaac |
| 4441 | ctggagggat cccagatcta tgaagactcc atcgtcttac agtcagtgtt taagagtgcc |
| 4501 | cggcagaaaa ttgccaaaga ggaagagagt gaggatgaaa gcaatgaaga ggaggaagag |
| 4561 | gaagatgaag aagagtcaga gtccgaggca aaatcagtca aggtgaaaat taagctcaat |
| 4621 | aaaaaagatg acaaaggccg ggacaaaggg aaaggcaaga aaaggccaaa tcgaggaaaa |
| 4681 | gccaaacctg tagtgagcga ttttgacagc gatgaggagc aggatgaacg tgaacagtca |
| 4741 | gaaggaagtg ggacggatga tgagtgatca gtatggacct ttttccttgg tagaactgaa |
| 4801 | ttccttcctc ccctgtctca tttctaccca gtgagttcat ttgtcatata ggcactgggt |
| 4861 | tgtttctata tcatcatcgt ctataaacta gctttaggat agtgccagac aaacatatga |
| 4921 | tatcatggtg taaaaaacac acacatacac aaatatttgt aacatattgt gaccaaatgg |
| 4981 | gcctcaaaga ttcagattga aacaaacaaa aagcttttga tggaaaatat gtgggtggat |
| 5041 | agtatatttc tatgggtggg tctaatttgg taacggtttg attgtgcctg gttttatcac |
| 5101 | ctgttcagat gagaagattt ttgtcttttg tagcactgat aaccaggaga agccattaaa |
| 5161 | agccactggt tattttattt ttcatcaggc aattttcgag gtttttattt gttcggtatt |
| 5221 | gtttttttac actgtggtac atataagcaa ctttaatagg tgataaatgt acagtagtta |
| 5281 | gatttcacct gcatatacat ttttccattt tatgctctat gatctgaaca aaagcttttt |
| 5341 | gaattgtata agatttatgt ctactgtaaa cattgcttaa tttttttgct cttgatttaa |
| 5401 | aaaaaagttt tgttgaaagc gctattgaat attgcaatct atatagtgta ttggatggct |
| 5461 | tcttttgtca ccctgatctc ctatgttacc aatgtgtatc gtctccttct ccctaaagtg |
| 5521 | tacttaatct ttgctttctt tgcacaatgt ctttggttgc aagtcataag cctgaggcaa |
| 5581 | ataaaattcc agtaatttcg aagaatgtgg tgttggtgct ttcctaataa agaaataatt |
| 5641 | tagcttgaca aaaaaaaaaa aaaa |

SEQ ID NO: 179 Human SMARCA2 Amino Acid Sequence Isoform D
(NP_001276327.1)

| | |
|---|---|
| 1 | mwlaiedgnl eemeeevrlk krkrrrnvdk dpakedveka kkrrgrppae klspnppklt |
| 61 | kqmnaiidtv inykdssgrq lsevfiqlps rkelpeyyel irkpvdfkki kerirnhkyr |
| 121 | slgdlekdvm llchnaqtfn legsqiyeds ivlqsvfksa rqkiakeees edesneeeee |
| 181 | edeeesesea ksvkvkikln kkddkgrdkg kgkkrpnrgk akpvvsdfds deeqdereqs |
| 241 | egsgtdde |

SEQ ID NO: 180 Human SMARCA2 cDNA Sequence Variant 5 (NM_001289398.1,
CDS: 203-949)

| | |
|---|---|
| 1 | cttggagagg cggaggtgga aacgatgcgc aggagttggc ttggggcttt ttgtttgcgt |
| 61 | gtccctgttt acctattcat aatcatggat cccctctgct ttgtgatact gtgaaccacg |
| 121 | cataacagca attctttaca ccaccgggtt gagaagaagg cgcctgaggc tgactttctg |
| 181 | gacctgccgt cacgcagtaa agatgtggtt ggccatcgaa gacggcaatt tggaggaaat |
| 241 | ggaagaggaa gtacggctta agaagcgaaa aagacgaaga aatgtggata aagatcctgc |
| 301 | aaaagaagat gtggaaaaag ctaagaagag aagaggccgc cctcccgctg agaaactgtc |
| 361 | accaaatccc cccaaactga caaagcagat gaacgctatc atcgatactg tgataaacta |
| 421 | caaagatagt tcagggcgac agctcagtga agtcttcatt cagttacctt caaggaaaga |
| 481 | attaccagaa tactatgaat taattaggaa gccagtggat ttcaaaaaaa taaaggaaag |
| 541 | gattcgtaat cataagtacc ggagcctagg cgacctggag aaggatgtca tgcttctctg |
| 601 | tcacaacgct cagacgttca acctggaggg atcccagatc tatgaagact ccatcgtctt |
| 661 | acagtcagtg tttaagagtg cccggcagaa aattgccaaa gaggaagaga gtgaggatga |
| 721 | aagcaatgaa gaggaggaag aggaagatga agaagagtca gagtccgagg caaaatcagt |
| 781 | caaggtgaaa attaagctca ataaaaaaga tgacaaaggc cgggacaaag ggaaaggcaa |
| 841 | gaaaaggcca aatcgaggaa aagccaaacc tgtagtgagc gattttgaca gcgatgagga |
| 901 | gcaggatgaa cgtgaacagt cagaaggaag tgggacggat gatgagtgat cagtatggac |
| 961 | ctttttcctt ggtagaactg aattccttcc tcccctgtct catttctacc cagtgagttc |
| 1021 | atttgtcata taggcactgg gttgtttcta tatcatcatc gtctataaac tagctttagg |
| 1081 | atagtgccag acaaacatat gatatcatgg tgtaaaaaac acacacatac acaaatattt |
| 1141 | gtaacatatt gtgaccaaat gggcctcaaa gattcagatt gaaacaaaca aaaagctttt |
| 1201 | gatggaaaat atgtgggtgg atagtatatt tctatgggtg ggtctaattt ggtaacggtt |
| 1261 | tgattgtgcc tggttttatc acctgttcag atgagaagat ttttgtcttt tgtagcactg |
| 1321 | ataaccagga gaagccatta aaagccactg gttattttat ttttcatcag gcaattttcg |
| 1381 | aggtttttat ttgttcggta ttgttttttt acactgtggt acatataagc aactttaata |
| 1441 | ggtgataaat gtacagtagt tagatttcac ctgcatatac atttttccat tttatgctct |
| 1501 | atgatctgaa caaaagcttt ttgaattgta taagatttat gtctactgta aacattgctt |
| 1561 | aatttttttg ctcttgattt aaaaaaaagt tttgttgaaa gcgctattga atattgcaat |
| 1621 | ctatatagtg tattggatgg cttcttttgt caccctgatc tcctatgtta ccaatgtgta |
| 1681 | tcgtctcctt ctccctaaag tgtacttaat ctttgctttc tttgcacaat gtctttggtt |
| 1741 | gcaagtcata agcctgaggc aaataaaatt ccagtaattt cgaagaatgt ggtgttggtg |
| 1801 | ctttcctaat aaagaaataa tttagcttga caaaaaaaaa aaaaaa |

SEQ ID NO: 181 Human SMARCA2 Amino Acid Sequence Isoform E
(NP_001276328.1)

| | |
|---|---|
| 1 | mkrlaarcfa gllilspltv isdsrpadsg kaiedgnlee meeevrlkkr krrrnvdkdp |
| 61 | akedvekakk rrgrppaekl spnppkltkq mnaiidtvin ykdssgrqls evfiqlpsrk |
| 121 | elpeyyelir kpvdfkkike rirnhkyrsl gdlekdvmll chnaqtfnle gsqiyedsiv |
| 181 | lqsvfksarq kiakeeesed esneeeeeed eeeseseaks vkvkiklnkk ddkgrdkgkg |
| 241 | kkrpnrgkak pvvsdfdsde eqdereqseg sgtdde |

SEQ ID NO: 182 Human SMARCA2 cDNA Sequence Variant 6 (NM_001289399.1,
CDS: 106-936)

| | |
|---|---|
| 1 | attcacttca ttaaatctag aggcagttga gcatgggagc cgtctgtatg ttgaattagg |
| 61 | gctcgcactc ttgcgcaaca cgtcaccagt cggaaactgg ggctgatgaa gagactagca |
| 121 | gctcgctgct ttgctggctt gttaatttta tccccactaa ctgtgatttc tgatagccgg |
| 181 | cctgctgata gtggtaaggc catcgaagac ggcaatttgg aggaaatgga agaggaagta |
| 241 | cggcttaaga agcgaaaaag acgaagaaat gtggataaag atcctgcaaa agaagatgtg |
| 301 | gaaaaagcta agaagagaag aggccgccct cccgctgaga aactgtcacc aaatcccccc |
| 361 | aaactgacaa agcagatgaa cgctatcatc gatactgtga taaactacaa agatagttca |
| 421 | gggcgacagc tcagtgaagt cttcattcag ttaccttcaa ggaaagaatt accagaatac |
| 481 | tatgaattaa ttaggaagcc agtggatttc aaaaaaataa aggaaaggat tcgtaatcat |
| 541 | aagtaccgga gcctaggcga cctggagaag gatgtcatgc ttctctgtca caacgctcag |
| 601 | acgttcaacc tggagggatc ccagatctat gaagactcca tcgtcttaca gtcagtgttt |
| 661 | aagagtgccc ggcagaaaat tgccaaagag gaagagagtg aggatgaaag caatgaagag |
| 721 | gaggaagagg aagatgaaga agagtcagag tccgaggcaa aatcagtcaa ggtgaaaatt |
| 781 | aagctcaata aaaaagatga caaaggccgg gacaaaggga aaggcaagaa aaggccaaat |
| 841 | cgaggaaaag ccaaacctgt agtgagcgat tttgacagcg atgaggagca ggatgaacgt |
| 901 | gaacagtcag aaggaagtgg gacggatgat gagtgatcag tatggacctt tttccttggt |
| 961 | agaactgaat tccttcctcc cctgtctcat ttctacccag tgagttcatt tgtcatatag |
| 1021 | gcactgggtt gtttctatat catcatcgtc tataaactag ctttaggata gtgccagaca |
| 1081 | aacatatgat atcatggtgt aaaaaacaca cacatacaca aatatttgta acatattgtg |
| 1141 | accaaatggg cctcaaagat tcagattgaa acaaacaaaa agcttttgat ggaaaatatg |
| 1201 | tgggtggata gtatatttct atgggtgggt ctaatttggt aacggtttga ttgtgcctgg |
| 1261 | ttttatcacc tgttcagatg agaagatttt tgtcttttgt agcactgata accaggagaa |
| 1321 | gccattaaaa gccactggtt attttatttt tcatcaggca attttcgagg tttttatttg |
| 1381 | ttcggtattg tttttttaca ctgtggtaca tataagcaac tttaataggt gataaatgta |
| 1441 | cagtagttag atttcacctg catatacatt tttccatttt atgctctatg atctgaacaa |
| 1501 | aagctttttg aattgtataa gatttatgtc tactgtaaac attgcttaat ttttttgctc |
| 1561 | ttgatttaaa aaaaagtttt gttgaaagcg ctattgaata ttgcaatcta tatagtgtat |
| 1621 | tggatggctt cttttgtcac cctgatctcc tatgttacca atgtgtatcg tctccttctc |
| 1681 | cctaaagtgt acttaatctt tgctttcttt gcacaatgtc tttggttgca agtcataagc |
| 1741 | ctgaggcaaa taaaattcca gtaatttcga agaatgtggt gttggtgctt tcctaataaa |
| 1801 | gaaataattt agcttgacaa aaaaaaaaaa aaa |

SEQ ID NO: 183 Human SMARCA2 Amino Acid Sequence Isoform F
(NP_001276329.1)

| | |
|---|---|
| 1 | mlmkrlaarc fagllilspl tvisdsrpad sgkaiedgnl eemeeevilk krkrrrnvdk |
| 61 | dpakedveka kkrrgrppae klspnppklt kqmnaiidtv inykdssgrq lsevfiqlps |
| 121 | rkelpeyyel irkpvdfkki kerirnhkyr slgdlekdvm llchnaqtfn legsqiyeds |
| 181 | ivlqsvfksa rqkiakeees edesneeeee edeeesesea ksvkvkikln kkddkgrdkg |
| 241 | kgkkrpnrgk akpvvsdfds deeqdereqs egsgtdde |

SEQ ID NO: 184 Human SMARCA2 cDNA Sequence Variant 7 (NM_001289400.1,
CDS: 521-1357)

| | |
|---|---|
| 1 | acttcattaa atctagaggc agttgagcat gggagccgtc tgtatgttga attagggctc |
| 61 | gcactcttgc gcaacacgtc accagtcgga aactgggggt ttgcttctgt gatttatttc |
| 121 | attattgtgc tggtaaaagg tttggaaggg aattcttttt gggggtagta ctttagcatt |
| 181 | gtgtagcaag ttttggggtt ttttttgtgt gtgacccccc agcccccagc gctgagtttg |
| 241 | agtcagttga gccagtttag taaataattt tttaaaataa aagaacagtt taaaatctcc |
| 301 | atgaataatt ttacttacat gcaggagtaa tcttactcta ctctttatgt gcgaaaagca |
| 361 | ttgggaagtg tttagtgaat tgatttccat tagaaaaaga cccttagaaa tcacagaaca |
| 421 | taaagcactg catatggatg tgtttggggt ctttggggag gagggaagat gttttgtagc |
| 481 | tctctgcatt cctgcataaa accttagttt gaggggaata atgctgatga agagactagc |
| 541 | agctcgctgc tttgctggct tgttaatttt atccccacta actgtgattt ctgatagccg |
| 601 | gcctgctgat agtggtaagg ccatcgaaga cggcaatttg gaggaaatgg aagaggaagt |
| 661 | acggcttaag aagcgaaaaa gacgaagaaa tgtggataaa gatcctgcaa aagaagatgt |
| 721 | ggaaaaagct aagaagagaa gaggccgccc tcccgctgag aaactgtcac caaatccccc |
| 781 | caaactgaca aagcagatga acgctatcat cgatactgtg ataaactaca aagatagttc |
| 841 | agggcgacag ctcagtgaag tcttcattca gttaccttca aggaaagaat taccagaata |
| 901 | ctatgaatta attaggaagc cagtggattt caaaaaaata aaggaaagga ttcgtaatca |
| 961 | taagtaccgg agcctaggcg acctggagaa ggatgtcatg cttctctgtc acaacgctca |
| 1021 | gacgttcaac ctggagggat cccagatcta tgaagactcc atcgtcttac agtcagtgtt |
| 1081 | taagagtgcc cggcagaaaa ttgccaaaga ggaagagagt gaggatgaaa gcaatgaaga |
| 1141 | ggaggaagag gaagatgaag aagagtcaga gtccgaggca aaatcagtca aggtgaaaat |
| 1201 | taagctcaat aaaaaagatg acaaaggccg ggacaaaggg aaaggcaaga aaaggccaaa |
| 1261 | tcgaggaaaa gccaaacctg tagtgagcga ttttgacagc gatgaggagc aggatgaacg |
| 1321 | tgaacagtca gaaggaagtg ggacggatga tgagtgatca gtatggacct ttttccttgg |
| 1381 | tagaactgaa ttccttcctc ccctgtctca tttctaccca gtgagttcat ttgtcatata |
| 1441 | ggcactgggt tgtttctata tcatcatcgt ctataaacta gctttaggat agtgccagac |
| 1501 | aaacatatga tatcatggtg taaaaaacac acacatacac aaatatttgt aacatattgt |
| 1561 | gaccaaatgg gcctcaaaga ttcagattga aacaaacaaa aagcttttga tggaaaatat |
| 1621 | gtgggtggat agtatatttc tatgggtggg tctaatttgg taacggtttg attgtgcctg |
| 1681 | gttttatcac ctgttcagat gagaagattt ttgtcttttg tagcactgat aaccaggaga |
| 1741 | agccattaaa agccactggt tattttattt ttcatcaggc aattttcgag gtttttattt |
| 1801 | gttcggtatt gtttttttac actgtggtac atataagcaa ctttaatagg tgataaatgt |
| 1861 | acagtagtta gatttcacct gcatatacat ttttccattt tatgctctat gatctgaaca |
| 1921 | aaagcttttt gaattgtata agatttatgt ctactgtaaa cattgcttaa tttttttgct |
| 1981 | cttgatttaa aaaaaagttt tgttgaaagc gctattgaat attgcaatct atatagtgta |
| 2041 | ttggatggct tcttttgtca ccctgatctc ctatgttacc aatgtgtatc gtctccttct |
| 2101 | ccctaaagtg tacttaatct ttgctttctt tgcacaatgt ctttggttgc aagtcataag |
| 2161 | cctgaggcaa ataaaattcc agtaatttcg aagaatgtgg tgttggtgct ttcctaataa |
| 2221 | agaaataatt tagcttgaca aaaaaaaaaa aaaa |

SEQ ID NO: 185 Mouse SMARCA2 cDNA Sequence variant 1 (NM_011416.2; CDS:
111-4862)

| | |
|---|---|
| 1 | ctcgctccct ctgtttctgt actctgggtg actcagagag ggaagattca gccagcacac |
| 61 | tgctcgcgag caagtgtcac tctgctaact ggcagagcca ggagacctag atgtccacac |
| 121 | ccacagaccc agcagcaatg ccccatcctg ggccctcccc ggggcctgga ccctctcctg |
| 181 | gaccaattct ggggcctagt ccaggaccag gaccatcccc aggttctgtg cacagcatga |
| 241 | tgggtcctag tcccggacct cccagcgtct cacatcctct gtcaacgatg ggctctgcag |
| 301 | acttcccaca ggaaggcatg caccaattac ataagcccat ggatgggata catgacaaag |
| 361 | ggattgtaga agatgtccac tgtggatcca tgaagggcac cagcatgcgc cccccacacc |
| 421 | caggaatggg ccctccacag agccccatgg accagcacag ccaaggttat atgtcaccac |
| 481 | atccgtctcc tctgggagcc ccggagcacg tctctagccc tatatctgga ggaggcccaa |
| 541 | ccccacccca gatgccaccg agccagccag gggcactcat cccaggagat ccgcaggcca |
| 601 | tgaaccagcc taacagaggt ccctcgcctt tcagtcctgt gcagctgcat cagcttcgag |
| 661 | ctcagatttt agcttacaaa atgttggcca ggggccagcc tctccctgaa actctgcagc |
| 721 | tggcagtcca gggaaaaagg accttgcctg gcatgcagca gcagcagcag caacaacaac |
| 781 | aacagcagca gcagcagcag cagcagcagc agcaacagca gcaacaacag cagccccagc |
| 841 | agcctcagca gcaggctcag gcacagcccc agcagcagca gcaacagcag cagcagccag |
| 901 | ctcttgttag ctataatcga ccatctggcc ccgggcagga gctgctactg agtggccaga |
| 961 | gcgctccgca gaagctgtca gcaccagcac caagcggccg accttcaccg gcaccccagg |
| 1021 | ccgccgtcca gcccacggcc acagcggtgc ccgggccctc cgtgcagcag cccgccccag |
| 1081 | ggcagccgtc tccggtccta cagctgcaac agaagcagag ccgcatcagc cccatccaga |
| 1141 | aaccgcaagg cctggacccg gtggagatcc tgcaggaacg agagtacaga cttcaagctc |
| 1201 | gcatcgctca taggatacaa gaactggaaa gtctgcctgg ttccttgcca ccagatttac |
| 1261 | gcaccaaagc aaccgtggaa ctgaaagcac ttcgcttact caacttccaa cgtcagctga |
| 1321 | gacaggaggt ggtggcctgc atgcggaggg acaccaccct ggagacggcc ctcaactcca |
| 1381 | aagcatataa gcggagcaag cgccagaccc tgcgtgaggc acgcatgaca gagaaactgg |
| 1441 | agaagcagca gaagatagaa caggagagga aacgccggca gaaacaccag gaatacctga |
| 1501 | acagtatttt gcaacatgca aaagatttta aggaatatca ccggtctgtg gccgggaaga |
| 1561 | tccagaagct ctccaaagca gtggcgactt ggcatgctaa cacagaaagg gagcagaaga |
| 1621 | aggagacgga gcggatcgag aaggagagaa tgcggaggct gatggccgaa gatgaagagg |
| 1681 | gctacaggaa gcttattgac caaaagaaag acagacgtct cgcctaccta ttgcagcaga |
| 1741 | ccgatgagta tgtcgccaat ctgaccaacc tggtgtggga gcacaagcag gcccaagcag |
| 1801 | ccaaagagaa gaagaagagg aggaggagga agaagaaggc tgaagagaat gcagagggag |
| 1861 | gggaacctgc cctgggacca gatggagagc caatagatga aagcagccag atgagtgacc |
| 1921 | tgcctgtcaa agtgacacac acagaaactg gcaaggtcct ctttggacca gaagcaccca |
| 1981 | aagcaagtca gctggatgcc tggctggaga tgaatcctgg ttacgaagtt gcacccagat |
| 2041 | ctgacagtga agagagtgaa tcggactacg aggaggagga tgaagaagaa gagtccagta |
| 2101 | ggcaggaaac cgaggagaag atactgctgg atcccaacag tgaagaagtt tccgaaaagg |
| 2161 | atgccaagca gatcattgag actgcgaagc aggacgtgga cgacgaatac agcatgcagt |
| 2221 | acagtgccag aggctctcag tcctactaca cggtggctca cgctatctct gagagggtgg |
| 2281 | agaagcagtc tgccctcctc attaacggca ccctaaagca ttaccagctc cagggcctgg |
| 2341 | aatggatggt ttccctgtat aataacaatc tgaacggaat cttagctgat gaaatggggc |
| 2401 | taggcaagac catccagacc attgcactca tcacgtatct gatggagcac aaaaggctca |
| 2461 | atggtcccta cctcatcatc gtccccctct cgactctgtc taactggaca tatgaatttg |
| 2521 | acaaatgggc tccttctgtg gtgaaaattt cttacaaggg tacccctgcc atgcgacgct |
| 2581 | ccctcgttcc ccagctacgg agtggcaaat tcaatgtcct cctgactact tacgagtaca |
| 2641 | ttataaaaga caagcacatt cttgcaaaga ttcggtggaa gtacatgatc gtggacgaag |
| 2701 | gccaccggat gaagaatcac cactgcaagc taacccaggt cctgaacaca cactatgtgg |
| 2761 | cccccaggcg gatccttctg actgggaccc cactgcagaa taagcttccg gaactctggg |
| 2821 | ccctcctcaa cttcctcctc cctacaatct tcaagagttg cagcacattt gagcagtggt |
| 2881 | ttaatgctcc atttgccatg accggtgaaa gggtggacct gaacgaagaa gaaacgattt |
| 2941 | tgatcatcag gcgtctacac aaggtgctga gacccttttt actgaggagg ctgaagaaag |
| 3001 | aggttgagtc tcagcttccg gaaaaggttg agtatgtgat caagtgtgac atgtcagctc |
| 3061 | tgcagaagat tctgtaccgt cacatgcaag ccaaggggat cctcctcacg gacgggtctg |
| 3121 | agaaagataa gaaggggaaa ggaggtgcca agacacttat gaacaccatc atgcagctga |
| 3181 | gaaaaatatg caaccaccca tatatgtttc agcacattga ggaatccttt gctgaacacc |
| 3241 | tgggctattc gaatggggtc atcaatgggg ctgagctgta tcgggcctcg ggaaagtttg |
| 3301 | agctgcttga tcgtattctg cccaaattga gagcgactaa ccaccgcgtg ctgcttttct |
| 3361 | gccagatgac gtcactcatg accattatgg aggattactt tgcttttcgg aacttcctgt |
| 3421 | acctgcgcct tgacggcacc accaagtctg aagatcgtgc tgctttgcta aagaaattca |
| 3481 | atgaacctgg gtcccagtat ttcattttct tgctgagcac aagagcaggg ggcctgggct |
| 3541 | taaatcttca ggcggcagac acggtggtca tatttgacag cgactggaat cctcaccagg |
| 3601 | atctgcaggc ccaagaccga gctcaccgca ttggccaaca aaacgaggtc cgggtgctga |
| 3661 | ggctttgcac cgtcaacagt gtggaggaaa agattctcgc ggctgccaag tacaagctga |
| 3721 | acgtggatca gaaggttatc caagcaggca tgtttgacca gaagtcatcc agccacgagc |
| 3781 | ggagggcctt cctgcaggcc attctggagc acgaggagga gaatgaggaa gaagatgagg |
| 3841 | taccagacga cgagaccctg aaccagatga ttgctcgccg ggaggaagaa tttgatcttt |
| 3901 | ttatgcgcat ggacatggac cggcggaggg aggatgcccg gaacccgaag cgcaaacccc |
| 3961 | gcttgatgga ggaagatgag ctgccctcct ggattatcaa ggatgacgcc gaagtggaaa |
| 4021 | ggctcacctg tgaagaagag gaggagaaga tatttgggag gggctctcgc cagcgccggg |
| 4081 | atgtggacta cagtgatgcc ctcaccgaga agcaatggct cagggccatc gaagacggca |
| 4141 | atttggaaga aatggaagag gaggtacggc ttaagaagag aaaaagacga agaaatgtgg |
| 4201 | ataaagaccc cgtgaaggaa gatgtggaaa aagcgaagaa aagaagaggc cgccctccgg |
| 4261 | ctgagaagtt gtcaccaaat cccccaaaac taacgaagca gatgaacgcc atcattgata |
| 4321 | ctgtgataaa ctacaaagac agttcagggc gacagctcag tgaagtcttc attcagttac |
| 4381 | cttccaggaa agacttacca gaatactatg aattaattag gaagccagtg gatttcaaaa |
| 4441 | agataaagga gcgaatccgt aatcataagt atcggagcct gggagacctg gagaaagacg |
| 4501 | tcatgcttct ctgtcacaac gcacagacat tcaacttgga aggatcccag atctacgaag |
| 4561 | actccattgt cctacagtca gtgtttaaga gtgctcggca gaaaattgcc aaagaagaag |
| 4621 | agagtgagga agaaagcaat gaagaagagg aagaagatga tgaagaggag tcggagtcag |
| 4681 | aggcgaaatc tgtgaaggtg aaaatcaagc tgaataaaaa ggaagagaaa ggccgggaca |
| 4741 | cagggaaggg caagaagcgg ccaaaccgag gcaaagccaa acccgtcgtg agcgattttg |
| 4801 | acagtgacga ggaacaggaa gagaacgaac agtcagaagc aagtggaact gataacgagt |
| 4861 | gaccatcctg gacgtgagct tcccgcggtg gcagaaccga atgctttctt ccccctctcc |
| 4921 | ttcctcccca gtgagttcac ttgccattcg ggcacactgg gttatttctc cgtcctcatt |
| 4981 | gtcatctaga actagcttta gggtagtgcc agacaaacat atgatatcat ggtgtaaaaa |
| 5041 | aagaaacaca tgcgtgcaga cacactacac acacacacac acacacacac acacacacac |
| 5101 | acacatattt gtaacatatt gtgaccaaat gggcctcaaa gattcaaaga ttaaaaacaa |
| 5161 | aaagcttttg atggaaaaga tgtgggtgga tagtatattt ctacaggtgg gtcaggtttg |
| 5221 | gtagcagttt gatgtgctgg gttctgtcat ctgttctgat gagaagattt ttatcttctg |
| 5281 | cagtgctgat ggccgggagg aaccattcaa agccactggt tattttgttt ttcatcaggc |
| 5341 | gattttcaag attttcattt gtttcagtat tgttggtttt ctcttttctc ttttttacac |
| 5401 | tgtggtacat ataagcaact tgactagtga caaatgtaca gtagttagat atcacctaca |
| 5461 | tatacatttt tccattttat gctctatgat ctgaagaaca aaaaaaaaag ctttttgact |
| 5521 | tgtataagat ttatgtctac tgtaaacatt gcggaatttt tttttgttct tgttttattg |
| 5581 | acaatgctat tgagtattac agtgtctaga ataccctgga tggcttctct tgtccacccg |
| 5641 | atctcccgtg ttaccaatgt gtatggtctc cttctcccga aagtgtactt aatctttgct |
| 5701 | ttctttgcac aatgtctttg gttgcaagtc ataagcctga ggcaaataaa attccagtaa |
| 5761 | tttccaagaa tgtggtgttg gtactttcct aataaaccga taacgtacct tgaaaaaaaa |
| 5821 | aaaaaaaaaa a |

SEQ ID NO: 186 Mouse SMARCA2 Amino Acid Sequence isoform 1 (NP_035546.2)

| | |
|---|---|
| 1 | mstptdpaam phpgpspgpg pspgpilgps pgpgpspgsv hsmmgpspgp psvshplstm |
| 61 | gsadfpqegm hqlhkpmdgi hdkgivedvh cgsmkgtsmr pphpgmgppq spmdqhsqgy |
| 121 | msphpsplga pehvsspisg ggptppqmpp sqpgalipgd pqamnqpnrg pspfspvqlh |
| 241 | qpqqpqqqaq aqpqqqqqqq qqpalvsynr psgpgqelll sgqsapqkls apapsgrpsp |
| 301 | apqaavqpta tavpgpsvqq papgqpspvl qlqqkqsris piqkpqgldp veilqereyr |
| 361 | lqariahriq eleslpgslp pdlrtkatve lkalrllnfq rqlrqevvac mrrdttleta |
| 421 | lnskaykrsk rqtlrearmt eklekqqkie qerkrrqkhq eylnsilqha kdfkeyhrsv |
| 481 | agkiqklska vatwhanter eqkketerie kermrrlmae deegyrklid qkkdrrlayl |
| 541 | lqqtdeyvan ltnlvwehkq aqaakekkkr rrrkkkaeen aeggepalgp dgepidessq |
| 601 | msdlpvkvth tetgkvlfgp eapkasqlda wlemnpgyev aprsdseese sdyeeedeee |
| 661 | essrqeteek illdpnseev sekdakqiie takqdvddey smqysargsq syytvahais |
| 721 | ervekqsall ingtlkhyql qglewmvsly nnnlngilad emglgktiqt ialitylmeh |
| 781 | krlngpylii vplstlsnwt yefdkwapsv vkisykgtpa mrrslvpqlr sgkfnvlltt |
| 841 | yeyiikdkhi lakirwkymi vdeghrmknh hckltqvlnt hyvaprrill tgtplqnklp |
| 901 | elwallnfll ptifkscstf eqwfnapfam tgervdlnee etiliirrlh kvlrpfllrr |
| 961 | lkkevesqlp ekveyvikcd msalqkilyr hmqakgillt dgsekdkkgk ggaktlmnti |
| 1021 | mqlrkicnhp ymfqhieesf aehlgysngv ingaelyras gkfelldril pklratnhrv |
| 1081 | llfcqmtslm timedyfafr nflylrldgt tksedraall kkfnepgsqy fifllstrag |
| 1141 | glglnlqaad tvvifdsdwn phqdlqaqdr ahrigqqnev rvlrlctvns veekilaaak |
| 1201 | yklnvdqkvi qagmfdqkss sherraflqa ileheeenee edevpddetl nqmiarreee |
| 1261 | fdlfmrmdmd rrredarnpk rkprlmeede lpswiikdda everltceee eekifgrgsr |
| 1321 | qrrdvdysda ltekqwlrai edgnleemee evrlkkrkrr rnvdkdpvke dvekakkrrg |
| 1381 | rppaeklspn ppkltkqmna iidtvinykd ssgrqlsevf iqlpsrkdlp eyyelirkpv |
| 1441 | dfkkikerir nhkyrslgdl ekdvmllchn aqtfnlegsq iyedsivlqs vfksarqkia |
| 1501 | keeeseeesn eeeeeddeee seseaksvkv kiklnkkeek grdtgkgkkr pnrgkakpvv |
| 1561 | sdfdsdeeqe eneqseasgt dne |

SEQ ID NO: 187 Mouse SMARCA2 cDNA Sequence variant 2 (NM_026003.2; CDS:
301-1011)

| | |
|---|---|
| 1 | ttcacttcat taaatctaga ggcggttcag catgggagcc gtctgtatgt tgaattaggg |
| 61 | ctcgctctct tgcgcaacac gtcaccagtc ggaaactggg ggtttgcttc tgtgatttat |
| 121 | ttcattattg tgctggtaaa agctgatgaa gagactagca gctcgctgct ttgccggctt |
| 181 | gttaatttta tccccactaa ctgtgatttc cgatagccgg cctgctgata gtggtaagtg |
| 241 | cggctggctc tggtttaaag caagcgtttg caggccatcg aagacggcaa tttggaagaa |
| 301 | atggaagagg aggtacggct taagaagaga aaaagacgaa gaaatgtgga taaagacccc |
| 361 | gtgaaggaag atgtggaaaa agcgaagaaa agaagaggcc gccctccggc tgagaagttg |
| 421 | tcaccaaatc ccccaaaact aacgaagcag atgaacgcca tcattgatac tgtgataaac |
| 481 | tacaaagaca gttcagggcg acagctcagt gaagtcttca ttcagttacc ttccaggaaa |
| 541 | gacttaccag aatactatga attaattagg aagccagtgg atttcaaaaa gataaaggag |
| 601 | cgaatccgta atcataagta tcggagcctg ggagacctgg agaaagacgt catgcttctc |
| 661 | tgtcacaacg cacagacatt caacttggaa ggatcccaga tctacgaaga ctccattgtc |
| 721 | ctacagtcag tgtttaagag tgctcggcag aaaattgcca aagaagaaga gagtgaggaa |
| 781 | gaaagcaatg aagaagagga agaagatgat gaagaggagt cggagtcaga ggcgaaatct |
| 841 | gtgaaggtga aaatcaagct gaataaaaag gaagagaaag gccgggacac agggaagggc |
| 901 | aagaagcggc caaaccgagg caaagccaaa cccgtcgtga gcgattttga cagtgacgag |
| 961 | gaacaggaag agaacgaaca gtcagaagca agtggaactg ataacgagtg accatcctgg |
| 1021 | acgtgagctt cccgcggtgg cagaaccgaa tgctttcttc cccctctcct tcctccccag |
| 1081 | tgagttcact tgccattcgg gcacactggg ttatttctcc gtcctcattg tcatctagaa |
| 1141 | ctagctttag ggtagtgcca gacaaacata tgatatcatg gtgtaaaaaa agaaacacat |
| 1201 | gcgtgcagac acactacaca cacacacaca cacacacaca cacacacaca cacatatttg |
| 1261 | taacatattg tgaccaaatg ggcctcaaag attcaaagat taaaaacaaa aagcttttga |
| 1321 | tggaaaagat gtgggtggat agtatatttc tacaggtggg tcaggtttgg tagcagtttg |
| 1381 | atgtgctggg ttctgtcatc tgttctgatg agaagatttt tatcttctgc agtgctgatg |
| 1441 | gccgggagga accattcaaa gccactggtt attttgtttt tcatcaggcg attttcaaga |
| 1501 | ttttcatttg tttcagtatt gttggttttc tcttttctct tttttacact gtggtacata |
| 1561 | taagcaactt gactagtgac aaatgtacag tagttagata tcacctacat atacattttt |
| 1621 | ccattttatg ctctatgatc tgaagaacaa aaaaaaaagc tttttgactt gtataagatt |
| 1681 | tatgtctact gtaaacattg cggaattttt ttttgttctt gttttattga caatgctatt |
| 1741 | gagtattaca gtgtctagaa taccctggat ggcttctctt gtccacccga tctcccgtgt |
| 1801 | taccaatgtg tatggtctcc ttctcccgaa agtgtactta atctttgctt tctttgcaca |
| 1861 | atgtctttgg ttgcaagtca taagcctgag gcaaataaaa ttccagtaat ttccaagaat |
| 1921 | gtggtgttgg tactttccta ataaaccgat aacgtacctt gaaa |

SEQ ID NO: 188 Mouse SMARCA2 Amino Acid Sequence isoform 2 (NP_080279.1)

| | |
|---|---|
| 1 | meeevilkkr krrrnvdkdp vkedvekakk rrgrppaekl spnppkltkq mnaiidtvin |
| 61 | ykdssgrqls evfiqlpsrk dlpeyyelir kpvdfkkike rirnhkyrsl gdlekdvmll |
| 121 | chnaqtfnle gsqiyedsiv lqsvfksarq kiakeeesee esneeeeedd eeeseseaks |
| 181 | vkvkiklnkk eekgrdtgkg kkrpnrgkak pvvsdfdsde eqeeneqsea sgtdne |

SEQ ID NO: 189 Mouse SMARCA2 cDNA Sequence variant 3 (NM_001347439.1;
CDS: 180-1010)

| | |
|---|---|
| 1 | acacacacac acacacacac acgcaggctg aagtatgctt aactctttta acttggctgg |
| 61 | ggctttttag caccatatgg gttctttcgt gacgtccgga cccgaaagag tgcagtgtgc |
| 121 | ctttaaggaa agaggtacct caccaaactt ccctgtagtt gtgcctcacc atttagctga |
| 181 | tgaagagact agcagctcgc tgctttgccg gcttgttaat tttatcccca ctaactgtga |
| 241 | tttccgatag ccggcctgct gatagtggta aggccatcga agacggcaat ttggaagaaa |
| 301 | tggaagagga ggtacggctt aagaagagaa aaagacgaag aaatgtggat aaagaccccg |
| 361 | tgaaggaaga tgtggaaaaa gcgaagaaaa gaagaggccg ccctccggct gagaagttgt |
| 421 | caccaaatcc cccaaaacta acgaagcaga tgaacgccat cattgatact gtgataaact |
| 481 | acaaagacag ttcagggcga cagctcagtg aagtcttcat tcagttacct tccaggaaag |
| 541 | acttaccaga atactatgaa ttaattagga agccagtgga tttcaaaaag ataaaggagc |
| 601 | gaatccgtaa tcataagtat cggagcctgg gagacctgga gaaagacgtc atgcttctct |
| 661 | gtcacaacgc acagacattc aacttggaag gatcccagat ctacgaagac tccattgtcc |
| 721 | tacagtcagt gtttaagagt gctcggcaga aaattgccaa agaagaagag agtgaggaag |
| 781 | aaagcaatga agaagaggaa gaagatgatg aagaggagtc ggagtcagag gcgaaatctg |
| 841 | tgaaggtgaa aatcaagctg aataaaaagg aagagaaagg ccgggacaca gggaagggca |
| 901 | agaagcggcc aaaccgaggc aaagccaaac ccgtcgtgag cgattttgac agtgacgagg |
| 961 | aacaggaaga gaacgaacag tcagaagcaa gtggaactga taacgagtga ccatcctgga |
| 1021 | cgtgagcttc ccgcggtggc agaaccgaat gctttcttcc ccctctcctt cctccccagt |
| 1081 | gagttcactt gccattcggg cacactgggt tatttctccg tcctcattgt catctagaac |
| 1141 | tagctttagg gtagtgccag acaaacatat gatatcatgg tgtaaaaaaa gaaacacatg |
| 1201 | cgtgcagaca cactacacac acacacacac acacacacac acacacacac acatatttgt |
| 1261 | aacatattgt gaccaaatgg gcctcaaaga ttcaaagatt aaaaacaaaa agcttttgat |
| 1321 | ggaaaagatg tgggtggata gtatatttct acaggtgggt caggtttggt agcagtttga |
| 1381 | tgtgctgggt tctgtcatct gttctgatga gaagattttt atcttctgca gtgctgatgg |
| 1441 | ccgggaggaa ccattcaaag ccactggtta ttttgttttt catcaggcga ttttcaagat |
| 1501 | tttcatttgt ttcagtattg ttggttttct cttttctctt ttttacactg tggtacatat |
| 1561 | aagcaacttg actagtgaca aatgtacagt agttagatat cacctacata tacatttttc |
| 1621 | cattttatgc tctatgatct gaagaacaaa aaaaaaagct ttttgacttg tataagattt |
| 1681 | atgtctactg taaacattgc ggaatttttt tttgttcttg ttttattgac aatgctattg |
| 1741 | agtattacag tgtctagaat accctggatg gcttctcttg tccacccgat ctcccgtgtt |
| 1801 | accaatgtgt atggtctcct tctcccgaaa gtgtacttaa tctttgcttt ctttgcacaa |
| 1861 | tgtctttggt tgcaagtcat aagcctgagg caaataaaat tccagtaatt tccaagaatg |
| 1921 | tggtgttggt actttcctaa taaaccgata acgtaccttg aaaaaaaaaa aaaaaaaaa |

SEQ ID NO: 190 Mouse SMARCA2 Amino Acid Sequence isoform 3
(NP_001334368.1)

| | |
|---|---|
| 1 | mkrlaarcfa gllilspltv isdsrpadsg kaiedgnlee meeevrlkkr krrrnvdkdp |
| 61 | vkedvekakk rrgrppaekl spnppkltkq mnaiidtvin ykdssgrqls evfiqlpsrk |
| 121 | dlpeyyelir kpvdfkkike rirnhkyrsl gdlekdvmll chnaqtfnle gsqiyedsiv |
| 181 | lqsvfksarq kiakeeesee esneeeeedd eeeseseaks vkvkiklnkk eekgrdtgkg |
| 241 | kkrpnrgkak pvvsdfdsde eqeeneqsea sgtdne |

SEQ ID NO: 191 Human SMARCA4 Amino Acid Sequence Isoform A
(NP_001122321.1)

| | |
|---|---|
| 1 | mstpdpplgg tprpgpspgp gpspgamlgp spgpspgsah smmgpspgpp saghpiptqg |
| 61 | pggypqdnmh qmhkpmesmh ekgmsddpry nqmkgmgmrs gghagmgppp spmdqhsqgy |
| 121 | psplggseha sspvpasgps sgpqmssgpg gapldgadpq algqqnrgpt pfnqnqlhql |
| 181 | raqimaykml argqplpdhl qmavqgkrpm pgmqqqmptl pppsvsatgp gpgpgpgpgp |
| 241 | gpgpappnys rphgmggpnm pppgpsgvpp gmpgqppggp pkpwpegpma naaaptstpq |
| 301 | klippqptgr pspappavpp aaspvmppqt qspgqpaqpa pmvplhqkqs ritpiqkprg |
| 361 | ldpveilqer eyrlqariah riqelenlpg slagdlrtka tielkalrll nfqrqlrqev |
| 421 | vvcmrrdtal etalnakayk rskrqslrea riteklekqq kieqerkrrq khqeylnsil |
| 481 | qhakdfkeyh rsvtgkiqkl tkavatyhan tereqkkene riekermrrl maedeegyrk |
| 541 | lidqkkdkrl ayllqqtdey vanltelvrq hkaaqvakek kkkkkkkkae naegqtpaig |
| 601 | pdgepldets qmsdlpvkvi hvesgkiltg tdapkaggle awlemnpgye vaprsdsees |
| 661 | gseeeeeeee eeqpqaaqpp tlpveekkki pdpdsddvse vdarhiiena kqdvddeygv |
| 721 | sqalarglqs yyavahavte rvdkqsalmv ngvlkqyqik glewlvslyn nnlngilade |
| 781 | mglgktiqti alitylmehk ringpfliiv plstlsnway efdkwapsvv kvsykgspaa |
| 841 | rrafvpqlrs gkfnvlltty eyiikdkhil akirwkymiv deghrmknhh ckltqvlnth |
| 901 | yvaprrlllt gtplqnklpe lwallnfllp tifkscstfe qwfnapfamt gekvdlneee |
| 961 | tiliirrlhk vlrpfllrrl kkeveaqlpe kveyvikcdm salqrvlyrh mqakgvlltd |
| 1021 | gsekdkkgkg gtktlmntim qlrkicnhpy mfqhieesfs ehlgftggiv qgldlyrasg |
| 1081 | kfelldrilp klratnhkvl lfcqmtslmt imedyfayrg fkylrldgtt kaedrgmllk |
| 1141 | tfnepgseyf ifllstragg lglnlqsadt viifdsdwnp hqdlqaqdra hrigqqnevr |
| 1201 | vlrlctvnsv eekilaaaky klnvdqkviq agmfdqksss herraflqai leheeqdesr |
| 1261 | hcstgsgsas fahtapppag vnpdleeppl keedevpdde tvnqmiarhe eefdlfmrmd |
| 1321 | ldrrreearn pkrkprlmee delpswiikd daeverltce eeeekmfgrg srhrkevdys |
| 1381 | dsltekqwlk kitgkdihdt assvarglqf qrglqfctra skaieegtle eieeevrqkk |
| 1441 | ssrkrkrdsd agsstpttst rsrdkddesk kqkkrgrppa eklspnppnl tkkmkkivda |
| 1501 | vikykdsssg rqlsevfiql psrkelpeyy elirkpvdfk kikerirnhk yrslndlekd |
| 1561 | vmllcqnaqt fnlegsliye dsivlqsvft svrqkieked dsegeeseee eegeeegses |
| 1621 | esrsvkvkik lgrkekaqdr 1kggrrrpsr gsrakpvvsd ddseeeqeed rsgsgseed |

SEQ ID NO: 192 Human SMARCA4 cDNA Sequence Variant 1 (NM_001128849.1,
CDS: 75-5114)

| | |
|---|---|
| 1 | ggcgggggag gcgccgggaa gtcgacggcg ccggcggctc ctgcaggagg ccactgtctg |
| 61 | cagctcccgt gaagatgtcc actccagacc cacccctggg cggaactcct cggccaggtc |
| 121 | cttccccggg ccctggccct tcccctggag ccatgctggg ccctagcccg ggtccctcgc |
| 181 | cgggctccgc ccacagcatg atggggccca gcccagggcc gccctcagca ggacacccca |
| 241 | tccccaccca ggggcctgga gggtaccctc aggacaacat gcaccagatg cacaagccca |
| 301 | tggagtccat gcatgagaag ggcatgtcgg acgacccgcg ctacaaccag atgaaaggaa |
| 361 | tggggatgcg gtcagggggc catgctggga tggggccccc gcccagcccc atggaccagc |
| 421 | actcccaagg ttacccctcg cccctgggtg gctctgagca tgcctctagt ccagttccag |
| 481 | ccagtggccc gtcttcgggg ccccagatgt cttccgggcc aggaggtgcc ccgctggatg |
| 541 | gtgctgaccc ccaggccttg gggcagcaga accggggccc aaccccattt aaccagaacc |
| 601 | agctgcacca gctcagagct cagatcatgg cctacaagat gctggccagg gggcagcccc |
| 661 | tccccgacca cctgcagatg gcggtgcagg gcaagcggcc gatgcccggg atgcagcagc |
| 721 | agatgccaac gctacctcca ccctcggtgt ccgcaacagg acccggccct ggccctggcc |
| 781 | ctggccccgg cccgggtccc ggcccggcac ctccaaatta cagcaggcct catggtatgg |
| 841 | gagggcccaa catgcctccc ccaggaccct cgggcgtgcc ccccgggatg ccaggccagc |
| 901 | ctcctggagg gcctcccaag ccctggcctg aaggacccat ggcgaatgct gctgccccca |
| 961 | cgagcacccc tcagaagctg attcccccgc agccaacggg ccgcccttcc cccgcgcccc |
| 1021 | ctgccgtccc acccgccgcc tcgcccgtga tgccaccgca gacccagtcc cccgggcagc |
| 1081 | cggcccagcc cgcgcccatg gtgccactgc accagaagca gagccgcatc acccccatcc |
| 1141 | agaagccgcg gggcctcgac cctgtggaga tcctgcagga gcgcgagtac aggctgcagg |
| 1201 | ctcgcatcgc acaccgaatt caggaacttg aaaaccttcc cgggtccctg gccggggatt |
| 1261 | tgcgaaccaa agcgaccatt gagctcaagg ccctcaggct gctgaacttc cagaggcagc |
| 1321 | tgcgccagga ggtggtggtg tgcatgcgga gggacacagc gctggagaca gccctcaatg |
| 1381 | ctaaggccta caagcgcagc aagcgccagt ccctgcgcga ggcccgcatc actgagaagc |
| 1441 | tggagaagca gcagaagatc gagcaggagc gcaagcgccg gcagaagcac caggaatacc |
| 1501 | tcaatagcat tctccagcat gccaaggatt tcaaggaata tcacagatcc gtcacaggca |
| 1561 | aaatccagaa gctgaccaag gcagtggcca cgtaccatgc caacacggag cgggagcaga |
| 1621 | agaaagagaa cgagcggatc gagaaggagc gcatgcggag gctcatggct gaagatgagg |
| 1681 | aggggtaccg caagctcatc gaccagaaga aggacaagcg cctggcctac ctcttgcagc |
| 1741 | agacagacga gtacgtggct aacctcacgg agctggtgcg gcagcacaag gctgcccagg |
| 1801 | tcgccaagga gaaaaagaag aaaaagaaaa agaagaaggc agaaaatgca gaaggacaga |
| 1861 | cgcctgccat tgggccggat ggcgagcctc tggacgagac cagccagatg agcgacctcc |
| 1921 | cggtgaaggt gatccacgtg gagagtggga agatcctcac aggcacagat gcccccaaag |
| 1981 | ccgggcagct ggaggcctgg ctcgagatga acccggggta tgaagtagct ccgaggtctg |
| 2041 | atagtgaaga aagtggctca gaagaagagg aagaggagga ggaggaagag cagccgcagg |
| 2101 | cagcacagcc tcccaccctg cccgtggagg agaagaagaa gattccagat ccagacagcg |
| 2161 | atgacgtctc tgaggtggac gcgcggcaca tcattgagaa tgccaagcaa gatgtcgatg |
| 2221 | atgaatatgg cgtgtcccag gcccttgcac gtggcctgca gtcctactat gccgtggccc |
| 2281 | atgctgtcac tgagagagtg gacaagcagt cagcgcttat ggtcaatggt gtcctcaaac |
| 2341 | agtaccagat caaaggtttg gagtggctgg tgtccctgta caacaacaac ctgaacggca |
| 2401 | tcctggccga cgagatgggc ctggggaaga ccatccagac catcgcgctc atcacgtacc |
| 2461 | tcatggagca caaacgcatc aatgggccct tcctcatcat cgtgcctctc tcaacgctgt |
| 2521 | ccaactgggc gtacgagttt gacaagtggg ccccctccgt ggtgaaggtg tcttacaagg |
| 2581 | gatccccagc agcaagacgg gcctttgtcc cccagctccg gagtgggaag ttcaacgtct |
| 2641 | tgctgacgac gtacgagtac atcatcaaag acaagcacat cctcgccaag atccgttgga |
| 2701 | agtacatgat tgtggacgaa ggtcaccgca tgaagaacca ccactgcaag ctgacgcagg |
| 2761 | tgctcaacac gcactatgtg gcaccccgcc gcctgctgct gacgggcaca ccgctgcaga |
| 2821 | acaagcttcc cgagctctgg gcgctgctca acttcctgct gcccaccatc ttcaagagct |
| 2881 | gcagcacctt cgagcagtgg tttaacgcac cctttgccat gaccggggaa aaggtggacc |
| 2941 | tgaatgagga ggaaaccatt ctcatcatcc ggcgtctcca caaagtgctg cggcccttct |
| 3001 | tgctccgacg actcaagaag gaagtcgagg cccagttgcc cgaaaaggtg gagtacgtca |
| 3061 | tcaagtgcga catgtctgcg ctgcagcgag tgctctaccg ccacatgcag gccaagggcg |
| 3121 | tgctgctgac tgatggctcc gagaaggaca agaagggcaa aggcggcacc aagaccctga |
| 3181 | tgaacaccat catgcagctg cggaagatct gcaaccaccc ctacatgttc cagcacatcg |
| 3241 | aggagtcctt ttccgagcac ttggggttca ctggcggcat tgtccaaggg ctggacctgt |
| 3301 | accgagcctc gggtaaattt gagcttcttg atagaattct tcccaaactc cgagcaacca |
| 3361 | accacaaagt gctgctgttc tgccaaatga cctccctcat gaccatcatg gaagattact |
| 3421 | ttgcgtatcg cggctttaaa tacctcaggc ttgatggaac cacgaaggcg gaggaccggg |
| 3481 | gcatgctgct gaaaaccttc aacgagcccg gctctgagta cttcatcttc ctgctcagca |
| 3541 | cccgggctgg ggggctcggc ctgaacctcc agtcggcaga cactgtgatc atttttgaca |
| 3601 | gcgactggaa tcctcaccag gacctgcaag cgcaggaccg agcccaccgc atcgggcagc |
| 3661 | agaacgaggt gcgtgtgctc cgcctctgca ccgtcaacag cgtggaggag aagatcctag |
| 3721 | ctgcagccaa gtacaagctc aacgtggacc agaaggtgat ccaggccggc atgttcgacc |
| 3781 | agaagtcctc cagccatgag cggcgcgcct tcctgcaggc catcctggag cacgaggagc |
| 3841 | aggatgagag cagacactgc agcacgggca gcggcagtgc cagcttcgcc cacactgccc |
| 3901 | ctccgccagc gggcgtcaac cccgacttgg aggagccacc tctaaaggag gaagacgagg |
| 3961 | tgcccgacga cgagaccgtc aaccagatga tcgcccggca cgaggaggag tttgatctgt |
| 4021 | tcatgcgcat ggacctggac cgcaggcgcg aggaggcccg caaccccaag cggaagccgc |
| 4081 | gcctcatgga ggaggacgag ctcccctcgt ggatcatcaa ggacgacgcg gaggtggagc |
| 4141 | ggctgacctg tgaggaggag gaggagaaga tgttcggccg tggctcccgc caccgcaagg |
| 4201 | aggtggacta cagcgactca ctgacggaga agcagtggct caagaaaatt acaggaaaag |
| 4261 | atatccatga cacagccagc agtgtggcac gtgggctaca attccagcgt ggccttcagt |
| 4321 | tctgcacacg tgcgtcaaag gccatcgagg agggcacgct ggaggagatc gaagaggagg |
| 4381 | tccggcagaa gaaatcatca cggaagcgca agcgagacag cgacgccggc tcctccaccc |
| 4441 | cgaccaccag cacccgcagc cgcgacaagg acgacgagag caagaagcag aagaagcgcg |
| 4501 | ggcggccgcc tgccgagaaa ctctccccta acccacccaa cctcaccaag aagatgaaga |
| 4561 | agattgtgga tgccgtgatc aagtacaagg acagcagcag tggacgtcag ctcagcgagg |
| 4621 | tcttcatcca gctgccctcg cgaaaggagc tgcccgagta ctacgagctc atccgcaagc |
| 4681 | ccgtggactt caagaagata aaggagcgca ttcgcaacca caagtaccgc agcctcaacg |
| 4741 | acctagagaa ggacgtcatg ctcctgtgcc agaacgcaca gaccttcaac ctggagggct |
| 4801 | ccctgatcta tgaagactcc atcgtcttgc agtcggtctt caccagcgtg cggcagaaaa |
| 4861 | tcgagaagga ggatgacagt gaaggcgagg agagtgagga ggaggaagag ggcgaggagg |
| 4921 | aaggctccga atccgaatct cggtccgtca aagtgaagat caagcttggc cggaaggaga |
| 4981 | aggcacagga ccggctgaag ggcggccggc ggcggccgag ccgagggtcc cgagccaagc |
| 5041 | cggtcgtgag tgacgatgac agtgaggagg aacaagagga ggaccgctca ggaagtggca |
| 5101 | gcgaagaaga ctgagccccg acattccagt ctcgaccccg agcccctcgt tccagagctg |
| 5161 | agatggcata ggccttagca gtaacgggta gcagcagatg tagtttcaga cttggagtaa |
| 5221 | aactgtataa acaaaagaat cttccatatt tatacagcag agaagctgta ggactgtttg |
| 5281 | tgactggccc tgtcctggca tcagtagcat ctgtaacagc attaactgtc ttaaagagag |
| 5341 | agagagagaa ttccgaattg gggaacacac gatacctgtt tttcttttcc gttgctggca |
| 5401 | gtactgttgc gccgcagttt ggagtcactg tagttaagtg tggatgcatg tgcgtcaccg |
| 5461 | tccactcctc ctactgtatt ttattggaca ggtcagactc gccgggggcc cggcgagggt |
| 5521 | atgtcagtgt cactggatgt caaacagtaa taaattaaac caacaacaaa acgcacagcc |
| 5581 | aaaaaaaaa |

SEQ ID NO: 193 Human SMARCA4 Amino Acid Sequence Isoform B
(NP_001122316.1 and NP_003063.2)

| | |
|---|---|
| 1 | mstpdpplgg tprpgpspgp gpspgamlgp spgpspgsah smmgpspgpp saghpiptqg |
| 61 | pggypqdnmh qmhkpmesmh ekgmsddpry nqmkgmgmrs gghagmgppp spmdqhsqgy |
| 121 | psplggseha sspvpasgps sgpqmssgpg gapldgadpq algqqnrgpt pfnqnqlhql |
| 181 | raqimaykml argqplpdhl qmavqgkrpm pgmqqqmptl pppsvsatgp gpgpgpgpgp |
| 241 | gpgpappnys rphgmggpnm pppgpsgvpp gmpgqppggp pkpwpegpma naaaptstpq |
| 301 | klippqptgr pspappavpp aaspvmppqt qspgqpaqpa pmvplhqkqs ritpiqkprg |
| 361 | ldpveilqer eyrlqariah riqelenlpg slagdlrtka tielkalrll nfqrqlrqev |
| 421 | vvcmrrdtal etalnakayk rskrqslrea riteklekqq kieqerkrrq khqeylnsil |
| 481 | qhakdfkeyh rsvtgkiqkl tkavatyhan tereqkkene riekermrrl maedeegyrk |
| 541 | lidqkkdkrl ayllqqtdey vanltelvrq hkaaqvakek kkkkkkkkae naegqtpaig |
| 601 | pdgepldets qmsdlpvkvi hvesgkiltg tdapkagqle awlemnpgye vaprsdsees |
| 661 | gseeeeeeee eeqpqaaqpp tlpveekkki pdpdsddvse vdarhiiena kqdvddeygv |
| 721 | sqalarglqs yyavahavte rvdkqsalmv ngvlkqyqik glewlvslyn nnlngilade |
| 781 | mglgktiqti alitylmehk ringpfliiv plstlsnway efdkwapsvv kvsykgspaa |
| 841 | rrafvpqlrs gkfnvlltty eyiikdkhil akirwkymiv deghrmknhh ckltqvlnth |
| 901 | yvaprrlllt gtplqnklpe lwallnfllp tifkscstfe qwfnapfamt gekvdlneee |
| 961 | tiliirrlhk vlrpfllrrl kkeveaqlpe kveyvikcdm salqrvlyrh mqakgvlltd |
| 1021 | gsekdkkgkg gtktlmntim qlrkicnhpy mfqhieesfs ehlgftggiv qgldlyrasg |
| 1081 | kfelldrilp klratnhkvl lfcqmtslmt imedyfayrg fkylrldgtt kaedrgmllk |
| 1141 | tfnepgseyf ifllstragg lglnlqsadt viifdsdwnp hqdlqaqdra hrigqqnevr |
| 1201 | vlrlctvnsv eekilaaaky klnvdqkviq agmfdqksss herraflqai leheeqdesr |
| 1261 | hcstgsgsas fahtapppag vnpdleeppl keedevpdde tvnqmiarhe eefdlfmrmd |
| 1321 | ldrrreearn pkrkprlmee delpswiikd daeverltce eeeekmfgrg srhrkevdys |
| 1381 | dsltekqwlk aieegtleei eeevrqkkss rkrkrdsdag sstpttstrs rdkddeskkq |
| 1441 | kkrgrppaek lspnppnltk kmkkivdavi kykdsssgrq lsevfiqlps rkelpeyyel |
| 1501 | irkpvdfkki kerirnhkyr slndlekdvm llcqnaqtfn legsliyeds ivlqsvftsv |
| 1561 | rqkiekedds egeeseeeee geeegseses rsvkvkiklg rkekagdrlk ggrrrpsrgs |
| 1621 | rakpvvsddd seeeqeedrs gsgseed |

SEQ ID NO: 194 Human SMARCA4 cDNA Sequence Variant 2 (NM_001128844.1,
CDS: 361-5304)

| | |
|---|---|
| 1 | ggagaggccg ccgcggtgct gagggggagg ggagccggcg agcgcgcgcg cagcgggggc |
| 61 | gcgggtggcg cgcgtgtgtg tgaagggggg gcggtggccg aggcgggcgg gcgcgcgcgc |
| 121 | gaggcttccc ctcgtttggc ggcggcggcg gcttctttgt ttcgtgaaga gaagcgagac |
| 181 | gcccattctg cccccggccc cgcgcggagg ggcgggggag gcgccgggaa gtcgacggcg |
| 241 | ccggcggctc ctgcgtctcg cccttttgcc caggctagag tgcagtggtg cggtcatggt |
| 301 | tcactgcagc ctcaacctcc tggactcagc aggaggccac tgtctgcagc tcccgtgaag |
| 361 | atgtccactc cagacccacc cctgggcgga actcctcggc caggtccttc cccgggccct |
| 421 | ggcccttccc ctggagccat gctgggccct agcccgggtc cctcgccggg ctccgcccac |
| 481 | agcatgatgg ggcccagccc agggccgccc tcagcaggac accccatccc cacccagggg |
| 541 | cctggagggt accctcagga caacatgcac cagatgcaca agcccatgga gtccatgcat |
| 601 | gagaagggca tgtcggacga cccgcgctac aaccagatga aaggaatggg gatgcggtca |
| 661 | gggggccatg ctgggatggg gcccccgccc agccccatgg accagcactc ccaaggttac |
| 721 | ccctcgcccc tgggtggctc tgagcatgcc tctagtccag ttccagccag tggcccgtct |
| 781 | tcggggcccc agatgtcttc cgggccagga ggtgccccgc tggatggtgc tgacccccag |
| 841 | gccttggggc agcagaaccg gggcccaacc ccatttaacc agaaccagct gcaccagctc |
| 901 | agagctcaga tcatggccta caagatgctg gccagggggc agcccctccc cgaccacctg |
| 961 | cagatggcgg tgcagggcaa gcggccgatg cccgggatgc agcagcagat gccaacgcta |
| 1021 | cctccaccct cggtgtccgc aacaggaccc ggccctggcc ctggccctgg ccccggcccg |
| 1081 | ggtcccggcc cggcacctcc aaattacagc aggcctcatg gtatgggagg gcccaacatg |
| 1141 | cctcccccag gaccctcggg cgtgcccccc gggatgccag gccagcctcc tggagggcct |
| 1201 | cccaagccct ggcctgaagg acccatggcg aatgctgctg cccccacgag cacccctcag |
| 1261 | aagctgattc ccccgcagcc aacgggccgc ccttcccccg cgccccctgc cgtcccaccc |
| 1321 | gccgcctcgc ccgtgatgcc accgcagacc cagtcccccg ggcagccggc ccagcccgcg |
| 1381 | cccatggtgc cactgcacca gaagcagagc cgcatcaccc ccatccagaa gccgcggggc |
| 1441 | ctcgaccctg tggagatcct gcaggagcgc gagtacaggc tgcaggctcg catcgcacac |
| 1501 | cgaattcagg aacttgaaaa ccttcccggg tccctggccg gggatttgcg aaccaaagcg |
| 1561 | accattgagc tcaaggccct caggctgctg aacttccaga ggcagctgcg ccaggaggtg |
| 1621 | gtggtgtgca tgcggaggga cacagcgctg gagacagccc tcaatgctaa ggcctacaag |
| 1681 | cgcagcaagc gccagtccct gcgcgaggcc cgcatcactg agaagctgga gaagcagcag |
| 1741 | aagatcgagc aggagcgcaa gcgccggcag aagcaccagg aatacctcaa tagcattctc |
| 1801 | cagcatgcca aggatttcaa ggaatatcac agatccgtca caggcaaaat ccagaagctg |
| 1861 | accaaggcag tggccacgta ccatgccaac acggagcggg agcagaagaa agagaacgag |
| 1921 | cggatcgaga aggagcgcat gcggaggctc atggctgaag atgaggaggg gtaccgcaag |
| 1981 | ctcatcgacc agaagaagga caagcgcctg gcctacctct tgcagcagac agacgagtac |
| 2041 | gtggctaacc tcacggagct ggtgcggcag cacaaggctg cccaggtcgc caaggagaaa |
| 2101 | aagaagaaaa agaaaaagaa gaaggcagaa aatgcagaag gacagacgcc tgccattggg |
| 2161 | ccggatggcg agcctctgga cgagaccagc cagatgagcg acctcccggt gaaggtgatc |
| 2221 | cacgtggaga gtgggaagat cctcacaggc acagatgccc ccaaagccgg gcagctggag |
| 2281 | gcctggctcg agatgaaccc ggggtatgaa gtagctccga ggtctgatag tgaagaaagt |
| 2341 | ggctcagaag aagaggaaga ggaggaggag gaagagcagc cgcaggcagc acagcctccc |
| 2401 | accctgcccg tggaggagaa gaagaagatt ccagatccag acagcgatga cgtctctgag |
| 2461 | gtggacgcgc ggcacatcat tgagaatgcc aagcaagatg tcgatgatga atatggcgtg |
| 2521 | tcccaggccc ttgcacgtgg cctgcagtcc tactatgccg tggcccatgc tgtcactgag |
| 2581 | agagtggaca agcagtcagc gcttatggtc aatggtgtcc tcaaacagta ccagatcaaa |
| 2641 | ggtttggagt ggctggtgtc cctgtacaac aacaacctga acggcatcct ggccgacgag |
| 2701 | atgggcctgg ggaagaccat ccagaccatc gcgctcatca cgtacctcat ggagcacaaa |
| 2761 | cgcatcaatg ggcccttcct catcatcgtg cctctctcaa cgctgtccaa ctgggcgtac |
| 2821 | gagtttgaca agtgggcccc ctccgtggtg aaggtgtctt acaagggatc cccagcagca |
| 2881 | agacgggcct ttgtccccca gctccggagt gggaagttca acgtcttgct gacgacgtac |
| 2941 | gagtacatca tcaaagacaa gcacatcctc gccaagatcc gttggaagta catgattgtg |
| 3001 | gacgaaggtc accgcatgaa gaaccaccac tgcaagctga cgcaggtgct caacacgcac |
| 3061 | tatgtggcac cccgccgcct gctgctgacg ggcacaccgc tgcagaacaa gcttcccgag |
| 3121 | ctctgggcgc tgctcaactt cctgctgccc accatcttca agagctgcag caccttcgag |
| 3181 | cagtggttta acgcaccctt tgccatgacc ggggaaaagg tggacctgaa tgaggaggaa |
| 3241 | accattctca tcatccggcg tctccacaaa gtgctgcggc ccttcttgct ccgacgactc |
| 3301 | aagaaggaag tcgaggccca gttgcccgaa aaggtggagt acgtcatcaa gtgcgacatg |
| 3361 | tctgcgctgc agcgagtgct ctaccgccac atgcaggcca agggcgtgct gctgactgat |
| 3421 | ggctccgaga aggacaagaa gggcaaaggc ggcaccaaga ccctgatgaa caccatcatg |
| 3481 | cagctgcgga agatctgcaa ccacccctac atgttccagc acatcgagga gtccttttcc |
| 3541 | gagcacttgg ggttcactgg cggcattgtc caagggctgg acctgtaccg agcctcgggt |
| 3601 | aaatttgagc ttcttgatag aattcttccc aaactccgag caaccaacca caaagtgctg |
| 3661 | ctgttctgcc aaatgacctc cctcatgacc atcatggaag attactttgc gtatcgcggc |
| 3721 | tttaaatacc tcaggcttga tggaaccacg aaggcggagg accggggcat gctgctgaaa |
| 3781 | accttcaacg agcccggctc tgagtacttc atcttcctgc tcagcacccg ggctgggggg |
| 3841 | ctcggcctga acctccagtc ggcagacact gtgatcattt ttgacagcga ctggaatcct |
| 3901 | caccaggacc tgcaagcgca ggaccgagcc caccgcatcg ggcagcagaa cgaggtgcgt |
| 3961 | gtgctccgcc tctgcaccgt caacagcgtg gaggagaaga tcctagctgc agccaagtac |
| 4021 | aagctcaacg tggaccagaa ggtgatccag gccggcatgt tcgaccagaa gtcctccagc |
| 4081 | catgagcggc gcgccttcct gcaggccatc ctggagcacg aggagcagga tgagagcaga |
| 4141 | cactgcagca cgggcagcgg cagtgccagc ttcgcccaca ctgcccctcc gccagcgggc |
| 4201 | gtcaaccccg acttggagga gccacctcta aaggaggaag acgaggtgcc cgacgacgag |
| 4261 | accgtcaacc agatgatcgc ccggcacgag gaggagtttg atctgttcat gcgcatggac |
| 4321 | ctggaccgca ggcgcgagga ggcccgcaac cccaagcgga agccgcgcct catggaggag |
| 4381 | gacgagctcc cctcgtggat catcaaggac gacgcggagg tggagcggct gacctgtgag |
| 4441 | gaggaggagg agaagatgtt cggccgtggc tcccgccacc gcaaggaggt ggactacagc |
| 4501 | gactcactga cggagaagca gtggctcaag gccatcgagg agggcacgct ggaggagatc |
| 4561 | gaagaggagg tccggcagaa gaaatcatca cggaagcgca agcgagacag cgacgccggc |
| 4621 | tcctccaccc cgaccaccag cacccgcagc cgcgacaagg acgacgagag caagaagcag |
| 4681 | aagaagcgcg ggcggccgcc tgccgagaaa ctctccccta acccacccaa cctcaccaag |
| 4741 | aagatgaaga agattgtgga tgccgtgatc aagtacaagg acagcagcag tggacgtcag |
| 4801 | ctcagcgagg tcttcatcca gctgccctcg cgaaaggagc tgcccgagta ctacgagctc |
| 4861 | atccgcaagc ccgtggactt caagaagata aaggagcgca ttcgcaacca caagtaccgc |
| 4921 | agcctcaacg acctagagaa ggacgtcatg ctcctgtgcc agaacgcaca gaccttcaac |
| 4981 | ctggagggct ccctgatcta tgaagactcc atcgtcttgc agtcggtctt caccagcgtg |
| 5041 | cggcagaaaa tcgagaagga ggatgacagt gaaggcgagg agagtgagga ggaggaagag |
| 5101 | ggcgaggagg aaggctccga atccgaatct cggtccgtca aagtgaagat caagcttggc |
| 5161 | cggaaggaga aggcacagga ccggctgaag ggcggccggc ggcggccgag ccgagggtcc |
| 5221 | cgagccaagc cggtcgtgag tgacgatgac agtgaggagg aacaagagga ggaccgctca |
| 5281 | ggaagtggca gcgaagaaga ctgagccccg acattccagt ctcgaccccg agcccctcgt |
| 5341 | tccagagctg agatggcata ggccttagca gtaacgggta gcagcagatg tagtttcaga |
| 5401 | cttggagtaa aactgtataa acaaaagaat cttccatatt tatacagcag agaagctgta |
| 5461 | ggactgtttg tgactggccc tgtcctggca tcagtagcat ctgtaacagc attaactgtc |
| 5521 | ttaaagagag agagagagaa ttccgaattg gggaacacac gatacctgtt tttcttttcc |
| 5581 | gttgctggca gtactgttgc gccgcagttt ggagtcactg tagttaagtg tggatgcatg |
| 5641 | tgcgtcaccg tccactcctc ctactgtatt ttattggaca ggtcagactc gccgggggcc |
| 5701 | cggcgagggt atgtcagtgt cactggatgt caaacagtaa taaattaaac caacaacaaa |
| 5761 | acgcacagcc aaaaaaaaa |

SEQ ID NO: 195 Human SMARCA4 cDNA Sequence Variant 3 (NM_003072.3,
CDS: 285-5228)

| | |
|---|---|
| 1 | ggagaggccg ccgcggtgct gagggggagg ggagccggcg agcgcgcgcg cagcgggggc |
| 61 | gcgggtggcg cgcgtgtgtg tgaagggggg gcggtggccg aggcgggcgg gcgcgcgcgc |
| 121 | gaggcttccc ctcgtttggc ggcggcggcg gcttctttgt ttcgtgaaga gaagcgagac |
| 181 | gcccattctg cccccggccc cgcgcggagg ggcgggggag gcgccgggaa gtcgacggcg |
| 241 | ccggcggctc ctgcaggagg ccactgtctg cagctcccgt gaagatgtcc actccagacc |
| 301 | cacccctggg cggaactcct cggccaggtc cttccccggg ccctggccct tcccctggag |
| 361 | ccatgctggg ccctagcccg ggtccctcgc cgggctccgc ccacagcatg atggggccca |
| 421 | gcccagggcc gccctcagca ggacacccca tccccaccca ggggcctgga gggtaccctc |
| 481 | aggacaacat gcaccagatg cacaagccca tggagtccat gcatgagaag ggcatgtcgg |
| 541 | acgacccgcg ctacaaccag atgaaaggaa tggggatgcg gtcagggggc catgctggga |
| 601 | tggggccccc gcccagcccc atggaccagc actcccaagg ttacccctcg cccctgggtg |
| 661 | gctctgagca tgcctctagt ccagttccag ccagtggccc gtcttcgggg ccccagatgt |
| 721 | cttccgggcc aggaggtgcc ccgctggatg gtgctgaccc ccaggccttg gggcagcaga |
| 781 | accggggccc aaccccattt aaccagaacc agctgcacca gctcagagct cagatcatgg |
| 841 | cctacaagat gctggccagg gggcagcccc tccccgacca cctgcagatg gcggtgcagg |
| 901 | gcaagcggcc gatgcccggg atgcagcagc agatgccaac gctacctcca ccctcggtgt |
| 961 | ccgcaacagg acccggccct ggccctggcc ctggccccgg cccgggtccc ggcccggcac |
| 1021 | ctccaaatta cagcaggcct catggtatgg gagggcccaa catgcctccc ccaggaccct |
| 1081 | cgggcgtgcc ccccgggatg ccaggccagc ctcctggagg gcctcccaag ccctggcctg |
| 1141 | aaggacccat ggcgaatgct gctgccccca cgagcacccc tcagaagctg attcccccgc |
| 1201 | agccaacggg ccgcccttcc cccgcgcccc ctgccgtccc acccgccgcc tcgcccgtga |
| 1261 | tgccaccgca gacccagtcc cccgggcagc cggcccagcc cgcgcccatg gtgccactgc |
| 1321 | accagaagca gagccgcatc acccccatcc agaagccgcg gggcctcgac cctgtggaga |
| 1381 | tcctgcagga gcgcgagtac aggctgcagg ctcgcatcgc acaccgaatt caggaacttg |
| 1441 | aaaaccttcc cgggtccctg gccggggatt tgcgaaccaa agcgaccatt gagctcaagg |
| 1501 | ccctcaggct gctgaacttc cagaggcagc tgcgccagga ggtggtggtg tgcatgcgga |
| 1561 | gggacacagc gctggagaca gccctcaatg ctaaggccta caagcgcagc aagcgccagt |
| 1621 | ccctgcgcga ggcccgcatc actgagaagc tggagaagca gcagaagatc gagcaggagc |
| 1681 | gcaagcgccg gcagaagcac caggaatacc tcaatagcat tctccagcat gccaaggatt |
| 1741 | tcaaggaata tcacagatcc gtcacaggca aaatccagaa gctgaccaag gcagtggcca |
| 1801 | cgtaccatgc caacacggag cgggagcaga agaaagagaa cgagcggatc gagaaggagc |
| 1861 | gcatgcggag gctcatggct gaagatgagg aggggtaccg caagctcatc gaccagaaga |
| 1921 | aggacaagcg cctggcctac ctcttgcagc agacagacga gtacgtggct aacctcacgg |
| 1981 | agctggtgcg gcagcacaag gctgcccagg tcgccaagga gaaaaagaag aaaaagaaaa |
| 2041 | agaagaaggc agaaaatgca gaaggacaga cgcctgccat tgggccggat ggcgagcctc |
| 2101 | tggacgagac cagccagatg agcgacctcc cggtgaaggt gatccacgtg gagagtggga |
| 2161 | agatcctcac aggcacagat gcccccaaag ccgggcagct ggaggcctgg ctcgagatga |
| 2221 | acccggggta tgaagtagct ccgaggtctg atagtgaaga aagtggctca gaagaagagg |
| 2281 | aagaggagga ggaggaagag cagccgcagg cagcacagcc tcccaccctg cccgtggagg |
| 2341 | agaagaagaa gattccagat ccagacagcg atgacgtctc tgaggtggac gcgcggcaca |
| 2401 | tcattgagaa tgccaagcaa gatgtcgatg atgaatatgg cgtgtcccag gcccttgcac |
| 2461 | gtggcctgca gtcctactat gccgtggccc atgctgtcac tgagagagtg gacaagcagt |
| 2521 | cagcgcttat ggtcaatggt gtcctcaaac agtaccagat caaaggtttg gagtggctgg |
| 2581 | tgtccctgta caacaacaac ctgaacggca tcctggccga cgagatgggc ctggggaaga |
| 2641 | ccatccagac catcgcgctc atcacgtacc tcatggagca caaacgcatc aatgggccct |
| 2701 | tcctcatcat cgtgcctctc tcaacgctgt ccaactgggc gtacgagttt gacaagtggg |
| 2761 | ccccctccgt ggtgaaggtg tcttacaagg gatccccagc agcaagacgg gcctttgtcc |
| 2821 | cccagctccg gagtgggaag ttcaacgtct tgctgacgac gtacgagtac atcatcaaag |
| 2881 | acaagcacat cctcgccaag atccgttgga agtacatgat tgtggacgaa ggtcaccgca |
| 2941 | tgaagaacca ccactgcaag ctgacgcagg tgctcaacac gcactatgtg gcaccccgcc |
| 3001 | gcctgctgct gacgggcaca ccgctgcaga acaagcttcc cgagctctgg gcgctgctca |
| 3061 | acttcctgct gcccaccatc ttcaagagct gcagcacctt cgagcagtgg tttaacgcac |
| 3121 | cctttgccat gaccggggaa aaggtggacc tgaatgagga ggaaaccatt ctcatcatcc |
| 3181 | ggcgtctcca caaagtgctg cggcccttct tgctccgacg actcaagaag gaagtcgagg |
| 3241 | cccagttgcc cgaaaaggtg gagtacgtca tcaagtgcga catgtctgcg ctgcagcgag |
| 3301 | tgctctaccg ccacatgcag gccaagggcg tgctgctgac tgatggctcc gagaaggaca |
| 3361 | agaagggcaa aggcggcacc aagaccctga tgaacaccat catgcagctg cggaagatct |
| 3421 | gcaaccaccc ctacatgttc cagcacatcg aggagtcctt ttccgagcac ttggggttca |
| 3481 | ctggcggcat tgtccaaggg ctggacctgt accgagcctc gggtaaattt gagcttcttg |
| 3541 | atagaattct tcccaaactc cgagcaacca accacaaagt gctgctgttc tgccaaatga |
| 3601 | cctccctcat gaccatcatg gaagattact ttgcgtatcg cggctttaaa tacctcaggc |
| 3661 | ttgatggaac cacgaaggcg gaggaccggg gcatgctgct gaaaaccttc aacgagcccg |
| 3721 | gctctgagta cttcatcttc ctgctcagca cccgggctgg ggggctcggc ctgaacctcc |
| 3781 | agtcggcaga cactgtgatc atttttgaca gcgactggaa tcctcaccag gacctgcaag |
| 3841 | cgcaggaccg agcccaccgc atcgggcagc agaacgaggt gcgtgtgctc cgcctctgca |
| 3901 | ccgtcaacag cgtggaggag aagatcctag ctgcagccaa gtacaagctc aacgtggacc |
| 3961 | agaaggtgat ccaggccggc atgttcgacc agaagtcctc cagccatgag cggcgcgcct |
| 4021 | tcctgcaggc catcctggag cacgaggagc aggatgagag cagacactgc agcacgggca |
| 4081 | gcggcagtgc cagcttcgcc cacactgccc ctccgccagc gggcgtcaac cccgacttgg |
| 4141 | aggagccacc tctaaaggag gaagacgagg tgcccgacga cgagaccgtc aaccagatga |
| 4201 | tcgcccggca cgaggaggag tttgatctgt tcatgcgcat ggacctggac cgcaggcgcg |
| 4261 | aggaggcccg caaccccaag cggaagccgc gcctcatgga ggaggacgag ctcccctcgt |
| 4321 | ggatcatcaa ggacgacgcg gaggtggagc ggctgacctg tgaggaggag gaggagaaga |
| 4381 | tgttcggccg tggctcccgc caccgcaagg aggtggacta cagcgactca ctgacggaga |
| 4441 | agcagtggct caaggccatc gaggagggca cgctggagga gatcgaagag gaggtccggc |
| 4501 | agaagaaatc atcacggaag cgcaagcgag acagcgacgc cggctcctcc accccgacca |
| 4561 | ccagcacccg cagccgcgac aaggacgacg agagcaagaa gcagaagaag cgcgggcggc |
| 4621 | cgcctgccga gaaactctcc cctaacccac ccaacctcac caagaagatg aagaagattg |
| 4681 | tggatgccgt gatcaagtac aaggacagca gcagtggacg tcagctcagc gaggtcttca |
| 4741 | tccagctgcc ctcgcgaaag gagctgcccg agtactacga gctcatccgc aagcccgtgg |
| 4801 | acttcaagaa gataaaggag cgcattcgca accacaagta ccgcagcctc aacgacctag |
| 4861 | agaaggacgt catgctcctg tgccagaacg cacagacctt caacctggag ggctccctga |
| 4921 | tctatgaaga ctccatcgtc ttgcagtcgg tcttcaccag cgtgcggcag aaaatcgaga |
| 4981 | aggaggatga cagtgaaggc gaggagagtg aggaggagga agagggcgag gaggaaggct |
| 5041 | ccgaatccga atctcggtcc gtcaaagtga agatcaagct tggccggaag gagaaggcac |
| 5101 | aggaccggct gaagggcggc cggcggcggc cgagccgagg gtcccgagcc aagccggtcg |
| 5161 | tgagtgacga tgacagtgag gaggaacaag aggaggaccg ctcaggaagt ggcagcgaag |
| 5221 | aagactgagc cccgacattc cagtctcgac cccgagcccc tcgttccaga gctgagatgg |
| 5281 | cataggcctt agcagtaacg ggtagcagca gatgtagttt cagacttgga gtaaaactgt |
| 5341 | ataaacaaaa gaatcttcca tatttataca gcagagaagc tgtaggactg tttgtgactg |
| 5401 | gccctgtcct ggcatcagta gcatctgtaa cagcattaac tgtcttaaag agagagagag |
| 5461 | agaattccga attggggaac acacgatacc tgtttttctt ttccgttgct ggcagtactg |
| 5521 | ttgcgccgca gtttggagtc actgtagtta agtgtggatg catgtgcgtc accgtccact |
| 5581 | cctcctactg tattttattg gacaggtcag actcgccggg ggcccggcga gggtatgtca |
| 5641 | gtgtcactgg atgtcaaaca gtaataaatt aaaccaacaa caaaacgcac agccaaaaaa |
| 5701 | aaa |

SEQ ID NO: 196 Human SMARCA4 Amino Acid Sequence Isoform C
(NP_001122317.1)

| | |
|---|---|
| 1 | mstpdpplgg tprpgpspgp gpspgamlgp spgpspgsah smmgpspgpp saghpiptqg |
| 61 | pggypqdnmh qmhkpmesmh ekgmsddpry nqmkgmgmrs gghagmgppp spmdqhsqgy |
| 121 | psplggseha sspvpasgps sgpqmssgpg gapldgadpq algqqnrgpt pfnqnqlhql |
| 181 | raqimaykml argqplpdhl qmavqgkrpm pgmqqqmptl pppsvsatgp gpgpgpgpgp |
| 241 | gpgpappnys rphgmggpnm pppgpsgvpp gmpgqppggp pkpwpegpma naaaptstpq |
| 301 | klippqptgr pspappavpp aaspvmppqt qspgqpaqpa pmvplhqkqs ritpiqkprg |
| 361 | ldpveilqer eyrlqariah riqelenlpg slagdlrtka tielkalrll nfqrqlrqev |
| 421 | vvcmrrdtal etalnakayk rskrqslrea riteklekqq kieqerkrrq khqeylnsil |
| 481 | qhakdfkeyh rsvtgkiqkl tkavatyhan tereqkkene riekermrrl maedeegyrk |
| 541 | lidqkkdkrl ayllqqtdey vanltelvrq hkaaqvakek kkkkkkkkae naegqtpaig |
| 601 | pdgepldets qmsdlpvkvi hvesgkiltg tdapkagqle awlemnpgye vaprsdsees |
| 661 | gseeeeeeee eeqpqaaqpp tlpveekkki pdpdsddvse vdarhiiena kqdvddeygv |
| 721 | sqalarglqs yyavahavte rvdkqsalmv ngvlkqyqik glewlvslyn nnlngilade |
| 781 | mglgktiqti alitylmehk ringpfliiv plstlsnway efdkwapsvv kvsykgspaa |
| 841 | rrafvpqlrs gkfnvlltty eyiikdkhil akirwkymiv deghrmknhh ckltqvlnth |
| 901 | yvaprrlllt gtplqnklpe lwallnfllp tifkscstfe qwfnapfamt gekvdlneee |
| 961 | tiliirrlhk vlrpfllrrl kkeveaqlpe kveyvikcdm salqrvlyrh mqakgvlltd |
| 1021 | gsekdkkgkg gtktlmntim qlrkicnhpy mfqhieesfs ehlgftggiv qgldlyrasg |
| 1081 | kfelldrilp klratnhkvl lfcqmtslmt imedyfayrg fkylrldgtt kaedrgmllk |
| 1141 | tfnepgseyf ifllstragg lglnlqsadt viifdsdwnp hqdlqaqdra hrigqqnevr |
| 1201 | vlrlctvnsv eekilaaaky klnvdqkviq agmfdqksss herraflqai leheeqdeee |
| 1261 | devpddetvn qmiarheeef dlfmrmdldr rreearnpkr kprlmeedel pswiikddae |
| 1321 | verltceeee ekmfgrgsrh rkevdysdsl tekqwlktlk aieegtleei eeevrqkkss |
| 1381 | rkrkrdsdag sstpttstrs rdkddeskkq kkrgrppaek lspnppnltk kmkkivdavi |
| 1441 | kykdsssgrq lsevfiqlps rkelpeyyel irkpvdfkki kerirnhkyr slndlekdvm |
| 1501 | llcqnaqtfn legsliyeds ivlqsvftsv rqkiekedds egeeseeeee geeegseses |
| 1561 | rsvkvkiklg rkekaqdrlk ggrrrpsrgs rakpvvsddd seeeqeedrs gsgseed |

SEQ ID NO: 197 Human SMARCA4 cDNA Sequence Variant 4 (NM_001128845.1,
CDS: 1-4854)

| | |
|---|---|
| 1 | atgtccactc cagacccacc cctgggcgga actcctcggc caggtccttc cccgggccct |
| 61 | ggcccttccc ctggagccat gctgggccct agcccgggtc cctcgccggg ctccgcccac |
| 121 | agcatgatgg ggcccagccc agggccgccc tcagcaggac accccatccc cacccagggg |
| 181 | cctggagggt accctcagga caacatgcac cagatgcaca agcccatgga gtccatgcat |
| 241 | gagaagggca tgtcggacga cccgcgctac aaccagatga aaggaatggg gatgcggtca |
| 301 | gggggccatg ctgggatggg gcccccgccc agccccatgg accagcactc ccaaggttac |
| 361 | ccctcgcccc tgggtggctc tgagcatgcc tctagtccag ttccagccag tggcccgtct |
| 421 | tcggggcccc agatgtcttc cgggccagga ggtgccccgc tggatggtgc tgacccccag |
| 481 | gccttggggc agcagaaccg gggcccaacc ccatttaacc agaaccagct gcaccagctc |
| 541 | agagctcaga tcatggccta caagatgctg gccagggggc agcccctccc cgaccacctg |
| 601 | cagatggcgg tgcagggcaa gcggccgatg cccgggatgc agcagcagat gccaacgcta |
| 661 | cctccaccct cggtgtccgc aacaggaccc ggccctggcc ctggccctgg ccccggcccg |
| 721 | ggtcccggcc cggcacctcc aaattacagc aggcctcatg gtatgggagg gcccaacatg |
| 781 | cctcccccag gaccctcggg cgtgcccccc gggatgccag gccagcctcc tggagggcct |
| 841 | cccaagccct ggcctgaagg acccatggcg aatgctgctg cccccacgag cacccctcag |
| 901 | aagctgattc ccccgcagcc aacgggccgc ccttcccccg cgccccctgc cgtcccaccc |
| 961 | gccgcctcgc ccgtgatgcc accgcagacc cagtcccccg ggcagccggc ccagcccgcg |
| 1021 | cccatggtgc cactgcacca gaagcagagc cgcatcaccc ccatccagaa gccgcggggc |
| 1081 | ctcgaccctg tggagatcct gcaggagcgc gagtacaggc tgcaggctcg catcgcacac |
| 1141 | cgaattcagg aacttgaaaa ccttcccggg tccctggccg gggatttgcg aaccaaagcg |
| 1201 | accattgagc tcaaggccct caggctgctg aacttccaga ggcagctgcg ccaggaggtg |
| 1261 | gtggtgtgca tgcggaggga cacagcgctg gagacagccc tcaatgctaa ggcctacaag |
| 1321 | cgcagcaagc gccagtccct gcgcgaggcc cgcatcactg agaagctgga gaagcagcag |
| 1381 | aagatcgagc aggagcgcaa gcgccggcag aagcaccagg aatacctcaa tagcattctc |
| 1441 | cagcatgcca aggatttcaa ggaatatcac agatccgtca caggcaaaat ccagaagctg |
| 1501 | accaaggcag tggccacgta ccatgccaac acggagcggg agcagaagaa agagaacgag |
| 1561 | cggatcgaga aggagcgcat gcggaggctc atggctgaag atgaggaggg gtaccgcaag |
| 1621 | ctcatcgacc agaagaagga caagcgcctg gcctacctct tgcagcagac agacgagtac |
| 1681 | gtggctaacc tcacggagct ggtgcggcag cacaaggctg cccaggtcgc caaggagaaa |
| 1741 | aagaagaaaa agaaaaagaa gaaggcagaa aatgcagaag gacagacgcc tgccattggg |
| 1801 | ccggatggcg agcctctgga cgagaccagc cagatgagcg acctcccggt gaaggtgatc |
| 1861 | cacgtggaga gtgggaagat cctcacaggc acagatgccc ccaaagccgg gcagctggag |
| 1921 | gcctggctcg agatgaaccc ggggtatgaa gtagctccga ggtctgatag tgaagaaagt |
| 1981 | ggctcagaag aagaggaaga ggaggaggag gaagagcagc cgcaggcagc acagcctccc |
| 2041 | accctgcccg tggaggagaa gaagaagatt ccagatccag acagcgatga cgtctctgag |
| 2101 | gtggacgcgc ggcacatcat tgagaatgcc aagcaagatg tcgatgatga atatggcgtg |
| 2161 | tcccaggccc ttgcacgtgg cctgcagtcc tactatgccg tggcccatgc tgtcactgag |
| 2221 | agagtggaca agcagtcagc gcttatggtc aatggtgtcc tcaaacagta ccagatcaaa |
| 2281 | ggtttggagt ggctggtgtc cctgtacaac aacaacctga acggcatcct ggccgacgag |
| 2341 | atgggcctgg ggaagaccat ccagaccatc gcgctcatca cgtacctcat ggagcacaaa |
| 2401 | cgcatcaatg ggcccttcct catcatcgtg cctctctcaa cgctgtccaa ctgggcgtac |
| 2461 | gagtttgaca agtgggcccc ctccgtggtg aaggtgtctt acaagggatc cccagcagca |
| 2521 | agacgggcct ttgtccccca gctccggagt gggaagttca acgtcttgct gacgacgtac |
| 2581 | gagtacatca tcaaagacaa gcacatcctc gccaagatcc gttggaagta catgattgtg |
| 2641 | gacgaaggtc accgcatgaa gaaccaccac tgcaagctga cgcaggtgct caacacgcac |
| 2701 | tatgtggcac cccgccgcct gctgctgacg ggcacaccgc tgcagaacaa gcttcccgag |
| 2761 | ctctgggcgc tgctcaactt cctgctgccc accatcttca agagctgcag caccttcgag |
| 2821 | cagtggttta acgcaccctt tgccatgacc ggggaaaagg tggacctgaa tgaggaggaa |
| 2881 | accattctca tcatccggcg tctccacaaa gtgctgcggc ccttcttgct ccgacgactc |
| 2941 | aagaaggaag tcgaggccca gttgcccgaa aaggtggagt acgtcatcaa gtgcgacatg |
| 3001 | tctgcgctgc agcgagtgct ctaccgccac atgcaggcca agggcgtgct gctgactgat |
| 3061 | ggctccgaga aggacaagaa gggcaaaggc ggcaccaaga ccctgatgaa caccatcatg |
| 3121 | cagctgcgga agatctgcaa ccacccctac atgttccagc acatcgagga gtccttttcc |
| 3181 | gagcacttgg ggttcactgg cggcattgtc caagggctgg acctgtaccg agcctcgggt |
| 3241 | aaatttgagc ttcttgatag aattcttccc aaactccgag caaccaacca caaagtgctg |
| 3301 | ctgttctgcc aaatgacctc cctcatgacc atcatggaag attactttgc gtatcgcggc |
| 3361 | tttaaatacc tcaggcttga tggaaccacg aaggcggagg accggggcat gctgctgaaa |
| 3421 | accttcaacg agcccggctc tgagtacttc atcttcctgc tcagcacccg ggctgggggg |
| 3481 | ctcggcctga acctccagtc ggcagacact gtgatcattt ttgacagcga ctggaatcct |
| 3541 | caccaggacc tgcaagcgca ggaccgagcc caccgcatcg ggcagcagaa cgaggtgcgt |
| 3601 | gtgctccgcc tctgcaccgt caacagcgtg gaggagaaga tcctagctgc agccaagtac |
| 3661 | aagctcaacg tggaccagaa ggtgatccag gccggcatgt tcgaccagaa gtcctccagc |
| 3721 | catgagcggc gcgccttcct gcaggccatc ctggagcacg aggagcagga tgaggaggaa |
| 3781 | gacgaggtgc ccgacgacga gaccgtcaac cagatgatcg cccggcacga ggaggagttt |
| 3841 | gatctgttca tgcgcatgga cctggaccgc aggcgcgagg aggcccgcaa ccccaagcgg |
| 3901 | aagccgcgcc tcatggagga ggacgagctc ccctcgtgga tcatcaagga cgacgcggag |
| 3961 | gtggagcggc tgacctgtga ggaggaggag gagaagatgt tcggccgtgg ctcccgccac |
| 4021 | cgcaaggagg tggactacag cgactcactg acggagaagc agtggctcaa gaccctgaag |
| 4081 | gccatcgagg agggcacgct ggaggagatc gaagaggagg tccggcagaa gaaatcatca |
| 4141 | cggaagcgca agcgagacag cgacgccggc tcctccaccc cgaccaccag cacccgcagc |
| 4201 | cgcgacaagg acgacgagag caagaagcag aagaagcgcg ggcggccgcc tgccgagaaa |
| 4261 | ctctccccta acccacccaa cctcaccaag aagatgaaga agattgtgga tgccgtgatc |
| 4321 | aagtacaagg acagcagcag tggacgtcag ctcagcgagg tcttcatcca gctgccctcg |
| 4381 | cgaaaggagc tgcccgagta ctacgagctc atccgcaagc ccgtggactt caagaagata |
| 4441 | aaggagcgca ttcgcaacca caagtaccgc agcctcaacg acctagagaa ggacgtcatg |
| 4501 | ctcctgtgcc agaacgcaca gaccttcaac ctggagggct ccctgatcta tgaagactcc |
| 4561 | atcgtcttgc agtcggtctt caccagcgtg cggcagaaaa tcgagaagga ggatgacagt |
| 4621 | gaaggcgagg agagtgagga ggaggaagag ggcgaggagg aaggctccga atccgaatct |
| 4681 | cggtccgtca aagtgaagat caagcttggc cggaaggaga aggcacagga ccggctgaag |
| 4741 | ggcggccggx ggcggccgag ccgagggtcc cgagccaagc cggtcgtgag tgacgatgac |
| 4801 | agtgaggagg aacaagagga ggaccgctca ggaagtggca gcgaagaaga ctgagccccg |
| 4861 | acattccagt ctcgaccccg agcccctcgt tccagagctg agatggcata ggccttagca |
| 4921 | gtaacgggta gcagcagatg tagtttcaga cttggagtaa aactgtataa acaaaagaat |
| 4981 | cttccatatt tatacagcag agaagctgta ggactgtttg tgactggccc tgtcctggca |
| 5041 | tcagtagcat ctgtaacagc attaactgtc ttaaagagag agagagagaa ttccgaattg |
| 5101 | gggaacacac gatacctgtt tttcttttcc gttgctggca gtactgttgc gccgcagttt |
| 5161 | ggagtcactg tagttaagtg tggatgcatg tgcgtcaccg tccactcctc ctactgtatt |
| 5221 | ttattggaca ggtcagactc gccgggggcc cggcgagggt atgtcagtgt cactggatgt |
| 5281 | caaacagtaa taaattaaac caacaacaaa acgcacagcc aaaaaaaaa |

SEQ ID NO: 198 Human SMARCA4 Amino Acid Sequence Isoform D
(NP_001122318.1)

| | |
|---|---|
| 1 | mstpdpplgg tprpgpspgp gpspgamlgp spgpspgsah smmgpspgpp saghpiptqg |
| 61 | pggypqdnmh qmhkpmesmh ekgmsddpry nqmkgmgmrs gghagmgppp spmdqhsqgy |
| 121 | psplggseha sspvpasgps sgpqmssgpg gapldgadpq algqqnrgpt pfnqnqlhql |
| 181 | raqimaykml argqplpdhl qmavqgkrpm pgmqqqmptl pppsvsatgp gpgpgpgpgp |
| 241 | gpgpappnys rphgmggpnm pppgpsgvpp gmpgqppggp pkpwpegpma naaaptstpq |
| 301 | klippqptgr pspappavpp aaspvmppqt qspgqpaqpa pmvplhqkqs ritpiqkprg |
| 361 | ldpveilqer eyrlqariah riqelenlpg slagdlrtka tielkalrll nfqrqlrqev |
| 421 | vvcmrrdtal etalnakayk rskrqslrea riteklekqq kieqerkrrq khqeylnsil |
| 481 | qhakdfkeyh rsvtgkiqkl tkavatyhan tereqkkene riekermrrl maedeegyrk |
| 541 | lidqkkdkrl ayllqqtdey vanltelvrq hkaaqvakek kkkkkkkkae naegqtpaig |
| 601 | pdgepldets qmsdlpvkvi hvesgkiltg tdapkaggle awlemnpgye vaprsdsees |
| 661 | gseeeeeeee eeqpqaaqpp tlpveekkki pdpdsddvse vdarhiiena kqdvddeygv |
| 721 | sqalarglqs yyavahavte rvdkqsalmv ngvlkqyqik glewlvslyn nnlngilade |
| 781 | mglgktiqti alitylmehk ringpfliiv plstlsnway efdkwapsvv kvsykgspaa |
| 841 | rrafvpqlrs gkfnvlltty eyiikdkhil akirwkymiv deghrmknhh ckltqvlnth |
| 901 | yvaprrlllt gtplqnklpe lwallnfllp tifkscstfe qwfnapfamt gekvdlneee |
| 961 | tiliirrlhk vlrpfllrrl kkeveaqlpe kveyvikcdm salqrvlyrh mqakgvlltd |
| 1021 | gsekdkkgkg gtktlmntim qlrkicnhpy mfqhieesfs ehlgftggiv qgldlyrasg |
| 1081 | kfelldrilp klratnhkvl lfcqmtslmt imedyfayrg fkylrldgtt kaedrgmllk |
| 1141 | tfnepgseyf ifllstragg lglnlqsadt viifdsdwnp hqdlqaqdra hrigqqnevr |
| 1201 | vlrlctvnsv eekilaaaky klnvdqkviq agmfdqksss herraflqai leheeqdeee |
| 1261 | devpddetvn qmiarheeef dlfmrmdldr rreearnpkr kprlmeedel pswiikddae |
| 1321 | verltceeee ekmfgrgsrh rkevdysdsl tekqwlktlk aieegtleei eeevrqkkss |
| 1381 | rkrkrdsdag sstpttstrs rdkddeskkq kkrgrppaek lspnppnltk kmkkivdavi |
| 1441 | kykdssgrql sevfiqlpsr kelpeyyeli rkpvdfkkik erirnhkyrs Indlekdvml |
| 1501 | lcqnaqtfnl egsliyedsi vlqsvftsvr qkiekeddse geeseeeeeg eeegsesesr |
| 1561 | svkvkiklgr kekaqdrlkg grrrpsrgsr akpvvsddds eeeqeedrsg sgseed |

SEQ ID NO: 199 Human SMARCA4 cDNA Sequence Variant 5 (NM_001128846.1,
CDS: 1-4851)

| | |
|---|---|
| 1 | atgtccactc cagacccacc cctgggcgga actcctcggc caggtccttc cccgggccct |
| 61 | ggcccttccc ctggagccat gctgggccct agcccgggtc cctcgccggg ctccgcccac |
| 121 | agcatgatgg ggcccagccc agggccgccc tcagcaggac accccatccc cacccagggg |
| 181 | cctggagggt accctcagga caacatgcac cagatgcaca agcccatgga gtccatgcat |
| 241 | gagaagggca tgtcggacga cccgcgctac aaccagatga aaggaatggg gatgcggtca |
| 301 | gggggccatg ctgggatggg gcccccgccc agccccatgg accagcactc ccaaggttac |
| 361 | ccctcgcccc tgggtggctc tgagcatgcc tctagtccag ttccagccag tggcccgtct |
| 421 | tcggggcccc agatgtcttc cgggccagga ggtgccccgc tggatggtgc tgacccccag |
| 481 | gccttggggc agcagaaccg gggcccaacc ccatttaacc agaaccagct gcaccagctc |
| 541 | agagctcaga tcatggccta caagatgctg gccagggggc agcccctccc cgaccacctg |
| 601 | cagatggcgg tgcagggcaa gcggccgatg cccgggatgc agcagcagat gccaacgcta |
| 661 | cctccaccct cggtgtccgc aacaggaccc ggccctggcc ctggccctgg ccccggcccg |
| 721 | ggtcccggcc cggcacctcc aaattacagc aggcctcatg gtatgggagg gcccaacatg |
| 781 | cctcccccag gaccctcggg cgtgcccccc gggatgccag gccagcctcc tggagggcct |
| 841 | cccaagccct ggcctgaagg acccatggcg aatgctgctg cccccacgag cacccctcag |
| 901 | aagctgattc ccccgcagcc aacgggccgc ccttcccccg cgccccctgc cgtcccaccc |
| 961 | gccgcctcgc ccgtgatgcc accgcagacc cagtcccccg ggcagccggc ccagcccgcg |
| 1021 | cccatggtgc cactgcacca gaagcagagc cgcatcaccc ccatccagaa gccgcggggc |
| 1081 | ctcgaccctg tggagatcct gcaggagcgc gagtacaggc tgcaggctcg catcgcacac |
| 1141 | cgaattcagg aacttgaaaa ccttcccggg tccctggccg gggatttgcg aaccaaagcg |
| 1201 | accattgagc tcaaggccct caggctgctg aacttccaga ggcagctgcg ccaggaggtg |
| 1261 | gtggtgtgca tgcggaggga cacagcgctg gagacagccc tcaatgctaa ggcctacaag |
| 1321 | cgcagcaagc gccagtccct gcgcgaggcc cgcatcactg agaagctgga gaagcagcag |
| 1381 | aagatcgagc aggagcgcaa gcgccggcag aagcaccagg aatacctcaa tagcattctc |
| 1441 | cagcatgcca aggatttcaa ggaatatcac agatccgtca caggcaaaat ccagaagctg |
| 1501 | accaaggcag tggccacgta ccatgccaac acggagcggg agcagaagaa agagaacgag |
| 1561 | cggatcgaga aggagcgcat gcggaggctc atggctgaag atgaggaggg gtaccgcaag |
| 1621 | ctcatcgacc agaagaagga caagcgcctg gcctacctct tgcagcagac agacgagtac |
| 1681 | gtggctaacc tcacggagct ggtgcggcag cacaaggctg cccaggtcgc caaggagaaa |
| 1741 | aagaagaaaa agaaaaagaa gaaggcagaa aatgcagaag gacagacgcc tgccattggg |
| 1801 | ccggatggcg agcctctgga cgagaccagc cagatgagcg acctcccggt gaaggtgatc |
| 1861 | cacgtggaga gtgggaagat cctcacaggc acagatgccc ccaaagccgg gcagctggag |
| 1921 | gcctggctcg agatgaaccc ggggtatgaa gtagctccga ggtctgatag tgaagaaagt |
| 1981 | ggctcagaag aagaggaaga ggaggaggag gaagagcagc cgcaggcagc acagcctccc |
| 2041 | accctgcccg tggaggagaa gaagaagatt ccagatccag acagcgatga cgtctctgag |
| 2101 | gtggacgcgc ggcacatcat tgagaatgcc aagcaagatg tcgatgatga atatggcgtg |
| 2161 | tcccaggccc ttgcacgtgg cctgcagtcc tactatgccg tggcccatgc tgtcactgag |
| 2221 | agagtggaca agcagtcagc gcttatggtc aatggtgtcc tcaaacagta ccagatcaaa |
| 2281 | ggtttggagt ggctggtgtc cctgtacaac aacaacctga acggcatcct ggccgacgag |
| 2341 | atgggcctgg ggaagaccat ccagaccatc gcgctcatca cgtacctcat ggagcacaaa |
| 2401 | cgcatcaatg ggcccttcct catcatcgtg cctctctcaa cgctgtccaa ctgggcgtac |
| 2461 | gagtttgaca agtgggcccc ctccgtggtg aaggtgtctt acaagggatc cccagcagca |
| 2521 | agacgggcct ttgtccccca gctccggagt gggaagttca acgtcttgct gacgacgtac |
| 2581 | gagtacatca tcaaagacaa gcacatcctc gccaagatcc gttggaagta catgattgtg |
| 2641 | gacgaaggtc accgcatgaa gaaccaccac tgcaagctga cgcaggtgct caacacgcac |
| 2701 | tatgtggcac cccgccgcct gctgctgacg ggcacaccgc tgcagaacaa gcttcccgag |
| 2761 | ctctgggcgc tgctcaactt cctgctgccc accatcttca agagctgcag caccttcgag |
| 2821 | cagtggttta acgcaccctt tgccatgacc ggggaaaagg tggacctgaa tgaggaggaa |
| 2881 | accattctca tcatccggcg tctccacaaa gtgctgcggc ccttcttgct ccgacgactc |
| 2941 | aagaaggaag tcgaggccca gttgcccgaa aaggtggagt acgtcatcaa gtgcgacatg |
| 3001 | tctgcgctgc agcgagtgct ctaccgccac atgcaggcca agggcgtgct gctgactgat |
| 3061 | ggctccgaga aggacaagaa gggcaaaggc ggcaccaaga ccctgatgaa caccatcatg |
| 3121 | cagctgcgga agatctgcaa ccacccctac atgttccagc acatcgagga gtccttttcc |
| 3181 | gagcacttgg ggttcactgg cggcattgtc caagggctgg acctgtaccg agcctcgggt |
| 3241 | aaatttgagc ttcttgatag aattcttccc aaactccgag caaccaacca caaagtgctg |
| 3301 | ctgttctgcc aaatgacctc cctcatgacc atcatggaag attactttgc gtatcgcggc |
| 3361 | tttaaatacc tcaggcttga tggaaccacg aaggcggagg accggggcat gctgctgaaa |
| 3421 | accttcaacg agcccggctc tgagtacttc atcttcctgc tcagcacccg ggctgggggg |
| 3481 | ctcggcctga acctccagtc ggcagacact gtgatcattt ttgacagcga ctggaatcct |
| 3541 | caccaggacc tgcaagcgca ggaccgagcc caccgcatcg ggcagcagaa cgaggtgcgt |
| 3601 | gtgctccgcc tctgcaccgt caacagcgtg gaggagaaga tcctagctgc agccaagtac |
| 3661 | aagctcaacg tggaccagaa ggtgatccag gccggcatgt tcgaccagaa gtcctccagc |
| 3721 | catgagcggc gcgccttcct gcaggccatc ctggagcacg aggagcagga tgaggaggaa |
| 3781 | gacgaggtgc ccgacgacga gaccgtcaac cagatgatcg cccggcacga ggaggagttt |
| 3841 | gatctgttca tgcgcatgga cctggaccgc aggcgcgagg aggcccgcaa ccccaagcgg |
| 3901 | aagccgcgcc tcatggagga ggacgagctc ccctcgtgga tcatcaagga cgacgcggag |
| 3961 | gtggagcggc tgacctgtga ggaggaggag gagaagatgt tcggccgtgg ctcccgccac |
| 4021 | cgcaaggagg tggactacag cgactcactg acggagaagc agtggctcaa gaccctgaag |
| 4081 | gccatcgagg agggcacgct ggaggagatc gaagaggagg tccggcagaa gaaatcatca |
| 4141 | cggaagcgca agcgagacag cgacgccggc tcctccaccc cgaccaccag cacccgcagc |
| 4201 | cgcgacaagg acgacgagag caagaagcag aagaagcgcg ggcggccgcc tgccgagaaa |
| 4261 | ctctccccta acccacccaa cctcaccaag aagatgaaga agattgtgga tgccgtgatc |
| 4321 | aagtacaagg acagcagtgg acgtcagctc agcgaggtct tcatccagct gccctcgcga |
| 4381 | aaggagctgc ccgagtacta cgagctcatc cgcaagcccg tggacttcaa gaagataaag |
| 4441 | gagcgcattc gcaaccacaa gtaccgcagc ctcaacgacc tagagaagga cgtcatgctc |
| 4501 | ctgtgccaga acgcacagac cttcaacctg gagggctccc tgatctatga agactccatc |
| 4561 | gtcttgcagt cggtcttcac cagcgtgcgg cagaaaatcg agaaggagga tgacagtgaa |
| 4621 | ggcgaggaga gtgaggagga ggaagagggc gaggaggaag gctccgaatc cgaatctcgg |
| 4681 | tccgtcaaag tgaagatcaa gcttggccgg aaggagaagg cacaggaccg gctgaagggc |
| 4741 | ggccggcggc ggccgagccg agggtcccga gccaagccgg tcgtgagtga cgatgacagt |
| 4801 | gaggaggaac aagaggagga ccgctcagga agtggcagcg aagaagactg agccccgaca |
| 4861 | ttccagtctc gaccccgagc ccctcgttcc agagctgaga tggcataggc cttagcagta |
| 4921 | acgggtagca gcagatgtag tttcagactt ggagtaaaac tgtataaaca aaagaatctt |
| 4981 | ccatatttat acagcagaga agctgtagga ctgtttgtga ctggccctgt cctggcatca |
| 5041 | gtagcatctg taacagcatt aactgtctta aagagagaga gagagaattc cgaattgggg |
| 5101 | aacacacgat acctgttttt cttttccgtt gctggcagta ctgttgcgcc gcagtttgga |
| 5161 | gtcactgtag ttaagtgtgg atgcatgtgc gtcaccgtcc actcctccta ctgtatttta |
| 5221 | ttggacaggt cagactcgcc gggggcccgg cgagggtatg tcagtgtcac tggatgtcaa |
| 5281 | acagtaataa attaaaccaa caacaaaacg cacagccaaa aaaaaa |

SEQ ID NO: 200 Human SMARCA4 Amino Acid Sequence Isoform E
(NP_001122319.1)

| | |
|---|---|
| 1 | mstpdpplgg tprpgpspgp gpspgamlgp spgpspgsah smmgpspgpp saghpiptqg |
| 61 | pggypqdnmh qmhkpmesmh ekgmsddpry nqmkgmgmrs gghagmgppp spmdqhsqgy |
| 121 | psplggseha sspvpasgps sgpqmssgpg gapldgadpq algqqnrgpt pfnqnqlhql |
| 181 | raqimaykml argqplpdhl qmavqgkrpm pgmqqqmptl pppsvsatgp gpgpgpgpgp |
| 241 | gpgpappnys rphgmggpnm pppgpsgvpp gmpgqppggp pkpwpegpma naaaptstpq |
| 301 | klippqptgr pspappavpp aaspvmppqt qspgqpaqpa pmvplhqkqs ritpiqkprg |
| 361 | ldpveilqer eyrlqariah riqelenlpg slagdlrtka tielkalrll nfqrqlrqev |
| 421 | vvcmrrdtal etalnakayk rskrqslrea riteklekqq kieqerkrrq khqeylnsil |
| 481 | qhakdfkeyh rsvtgkiqkl tkavatyhan tereqkkene riekermrrl maedeegyrk |
| 541 | lidqkkdkrl ayllqqtdey vanltelvrq hkaaqvakek kkkkkkkkae naegqtpaig |
| 601 | pdgepldets qmsdlpvkvi hvesgkiltg tdapkaggle awlemnpgye vaprsdsees |
| 661 | gseeeeeeee eeqpqaaqpp tlpveekkki pdpdsddvse vdarhiiena kqdvddeygv |
| 721 | sqalarglqs yyavahavte rvdkqsalmv ngvlkqyqik glewlvslyn nnlngilade |
| 781 | mglgktiqti alitylmehk ringpfliiv plstlsnway efdkwapsvv kvsykgspaa |
| 841 | rrafvpqlrs gkfnvlltty eyiikdkhil akirwkymiv deghrmknhh ckltqvlnth |
| 901 | yvaprrlllt gtplqnklpe lwallnfllp tifkscstfe qwfnapfamt gekvdlneee |
| 961 | tiliirrlhk vlrpfllrrl kkeveaqlpe kveyvikcdm salqrvlyrh mqakgvlltd |
| 1021 | gsekdkkgkg gtktlmntim qlrkicnhpy mfqhieesfs ehlgftggiv qgldlyrasg |
| 1081 | kfelldrilp klratnhkvl lfcqmtslmt imedyfayrg fkylrldgtt kaedrgmllk |
| 1141 | tfnepgseyf ifllstragg lglnlqsadt viifdsdwnp hqdlqaqdra hrigqqnevr |
| 1201 | vlrlctvnsv eekilaaaky klnvdqkviq agmfdqksss herraflqai leheeqdeee |
| 1261 | devpddetvn qmiarheeef dlfmrmdldr rreearnpkr kprlmeedel pswiikddae |
| 1321 | verltceeee ekmfgrgsrh rkevdysdsl tekqwlkaie egtleeieee vrqkkssrkr |
| 1381 | krdsdagsst pttstrsrdk ddeskkqkkr grppaeklsp nppnltkkmk kivdavikyk |
| 1441 | dsssgrqlse vfiqlpsrke lpeyyelirk pvdfkkiker irnhkyrsln dlekdvmllc |
| 1501 | qnaqtfnleg sliyedsivl qsvftsvrqk iekeddsege eseeeeegee egsesesrsv |
| 1561 | kvkiklgrke kaqdrlkggr rrpsrgsrak pvvsdddsee eqeedrsgsg seed |

SEQ ID NO: 201 Human SMARCA4 cDNA Sequence Variant 6 (NM_001128847.1,
CDS: 1-4845)

| | |
|---|---|
| 1 | atgtccactc cagacccacc cctgggcgga actcctcggc caggtccttc cccgggccct |
| 61 | ggcccttccc ctggagccat gctgggccct agcccgggtc cctcgccggg ctccgcccac |
| 121 | agcatgatgg ggcccagccc agggccgccc tcagcaggac accccatccc cacccagggg |
| 181 | cctggagggt accctcagga caacatgcac cagatgcaca agcccatgga gtccatgcat |
| 241 | gagaagggca tgtcggacga cccgcgctac aaccagatga aaggaatggg gatgcggtca |
| 301 | gggggccatg ctgggatggg gcccccgccc agccccatgg accagcactc ccaaggttac |
| 361 | ccctcgcccc tgggtggctc tgagcatgcc tctagtccag ttccagccag tggcccgtct |
| 421 | tcggggcccc agatgtcttc cgggccagga ggtgccccgc tggatggtgc tgacccccag |
| 481 | gccttggggc agcagaaccg gggcccaacc ccatttaacc agaaccagct gcaccagctc |
| 541 | agagctcaga tcatggccta caagatgctg gccagggggc agcccctccc cgaccacctg |
| 601 | cagatggcgg tgcagggcaa gcggccgatg cccgggatgc agcagcagat gccaacgcta |
| 661 | cctccaccct cggtgtccgc aacaggaccc ggccctggcc ctggccctgg ccccggcccg |
| 721 | ggtcccggcc cggcacctcc aaattacagc aggcctcatg gtatgggagg gcccaacatg |
| 781 | cctcccccag gaccctcggg cgtgcccccc gggatgccag gccagcctcc tggagggcct |
| 841 | cccaagccct ggcctgaagg acccatggcg aatgctgctg cccccacgag cacccctcag |
| 901 | aagctgattc ccccgcagcc aacgggccgc ccttcccccg cgccccctgc cgtcccaccc |
| 961 | gccgcctcgc ccgtgatgcc accgcagacc cagtcccccg ggcagccggc ccagcccgcg |
| 1021 | cccatggtgc cactgcacca gaagcagagc cgcatcaccc ccatccagaa gccgcggggc |
| 1081 | ctcgaccctg tggagatcct gcaggagcgc gagtacaggc tgcaggctcg catcgcacac |
| 1141 | cgaattcagg aacttgaaaa ccttcccggg tccctggccg gggatttgcg aaccaaagcg |
| 1201 | accattgagc tcaaggccct caggctgctg aacttccaga ggcagctgcg ccaggaggtg |
| 1261 | gtggtgtgca tgcggaggga cacagcgctg gagacagccc tcaatgctaa ggcctacaag |
| 1321 | cgcagcaagc gccagtccct gcgcgaggcc cgcatcactg agaagctgga gaagcagcag |
| 1381 | aagatcgagc aggagcgcaa gcgccggcag aagcaccagg aatacctcaa tagcattctc |
| 1441 | cagcatgcca aggatttcaa ggaatatcac agatccgtca caggcaaaat ccagaagctg |
| 1501 | accaaggcag tggccacgta ccatgccaac acggagcggg agcagaagaa agagaacgag |
| 1561 | cggatcgaga aggagcgcat gcggaggctc atggctgaag atgaggaggg gtaccgcaag |
| 1621 | ctcatcgacc agaagaagga caagcgcctg gcctacctct tgcagcagac agacgagtac |
| 1681 | gtggctaacc tcacggagct ggtgcggcag cacaaggctg cccaggtcgc caaggagaaa |
| 1741 | aagaagaaaa agaaaaagaa gaaggcagaa aatgcagaag gacagacgcc tgccattggg |
| 1801 | ccggatggcg agcctctgga cgagaccagc cagatgagcg acctcccggt gaaggtgatc |
| 1861 | cacgtggaga gtgggaagat cctcacaggc acagatgccc ccaaagccgg gcagctggag |
| 1921 | gcctggctcg agatgaaccc ggggtatgaa gtagctccga ggtctgatag tgaagaaagt |
| 1981 | ggctcagaag aagaggaaga ggaggaggag gaagagcagc cgcaggcagc acagcctccc |
| 2041 | accctgcccg tggaggagaa gaagaagatt ccagatccag acagcgatga cgtctctgag |
| 2101 | gtggacgcgc ggcacatcat tgagaatgcc aagcaagatg tcgatgatga atatggcgtg |
| 2161 | tcccaggccc ttgcacgtgg cctgcagtcc tactatgccg tggcccatgc tgtcactgag |
| 2221 | agagtggaca agcagtcagc gcttatggtc aatggtgtcc tcaaacagta ccagatcaaa |
| 2281 | ggtttggagt ggctggtgtc cctgtacaac aacaacctga acggcatcct ggccgacgag |
| 2341 | atgggcctgg ggaagaccat ccagaccatc gcgctcatca cgtacctcat ggagcacaaa |
| 2401 | cgcatcaatg ggcccttcct catcatcgtg cctctctcaa cgctgtccaa ctgggcgtac |
| 2461 | gagtttgaca agtgggcccc ctccgtggtg aaggtgtctt acaagggatc cccagcagca |
| 2521 | agacgggcct ttgtccccca gctccggagt gggaagttca acgtcttgct gacgacgtac |
| 2581 | gagtacatca tcaaagacaa gcacatcctc gccaagatcc gttggaagta catgattgtg |
| 2641 | gacgaaggtc accgcatgaa gaaccaccac tgcaagctga cgcaggtgct caacacgcac |
| 2701 | tatgtggcac cccgccgcct gctgctgacg ggcacaccgc tgcagaacaa gcttcccgag |
| 2761 | ctctgggcgc tgctcaactt cctgctgccc accatcttca agagctgcag caccttcgag |
| 2821 | cagtggttta acgcaccctt tgccatgacc ggggaaaagg tggacctgaa tgaggaggaa |
| 2881 | accattctca tcatccggcg tctccacaaa gtgctgcggc ccttcttgct ccgacgactc |
| 2941 | aagaaggaag tcgaggccca gttgcccgaa aaggtggagt acgtcatcaa gtgcgacatg |
| 3001 | tctgcgctgc agcgagtgct ctaccgccac atgcaggcca agggcgtgct gctgactgat |
| 3061 | ggctccgaga aggacaagaa gggcaaaggc ggcaccaaga ccctgatgaa caccatcatg |
| 3121 | cagctgcgga agatctgcaa ccacccctac atgttccagc acatcgagga gtccttttcc |
| 3181 | gagcacttgg ggttcactgg cggcattgtc caagggctgg acctgtaccg agcctcgggt |
| 3241 | aaatttgagc ttcttgatag aattcttccc aaactccgag caaccaacca caaagtgctg |
| 3301 | ctgttctgcc aaatgacctc cctcatgacc atcatggaag attactttgc gtatcgcggc |
| 3361 | tttaaatacc tcaggcttga tggaaccacg aaggCggagg accggggcat gctgctgaaa |
| 3421 | accttcaacg agcccggctc tgagtacttc atcttcctgc tcagcacccg ggctgggggg |
| 3481 | ctcggcctga acctccagtc ggcagacact gtgatcattt ttgacagcga ctggaatcct |
| 3541 | caccaggacc tgcaagcgca ggaccgagcc caccgcatcg ggcagcagaa cgaggtgcgt |
| 3601 | gtgctccgcc tctgcaccgt caacagcgtg gaggagaaga tcctagctgc agccaagtac |
| 3661 | aagctcaacg tggaccagaa ggtgatccag gccggcatgt tcgaccagaa gtcctccagc |
| 3721 | catgagcggc gcgccttcct gcaggccatc ctggagcacg aggagcagga tgaggaggaa |
| 3781 | gacgaggtgc ccgacgacga gaccgtcaac cagatgatcg cccggcacga ggaggagttt |
| 3841 | gatctgttca tgcgcatgga cctggaccgc aggcgcgagg aggcccgcaa ccccaagcgg |
| 3901 | aagccgcgcc tcatggagga ggacgagctc ccctcgtgga tcatcaagga cgacgcggag |
| 3961 | gtggagcggc tgacctgtga ggaggaggag gagaagatgt tcggccgtgg ctcccgccac |
| 4021 | cgcaaggagg tggactacag cgactcactg acggagaagc agtggctcaa ggccatcgag |
| 4081 | gagggcacgc tggaggagat cgaagaggag gtccggcaga agaaatcatc acggaagcgc |
| 4141 | aagcgagaca gcgacgccgg ctcctccacc ccgaccacca gcacccgcag ccgcgacaag |
| 4201 | gacgacgaga gcaagaagca gaagaagcgc gggCggccgc ctgccgagaa actctcccct |
| 4261 | aacccaccca acctcaccaa gaagatgaag aagattgtgg atgccgtgat caagtacaag |
| 4321 | gacagcagca gtggacgtca gctcagcgag gtcttcatcc agctgccctc gcgaaaggag |
| 4381 | ctgcccgagt actacgagct catccgcaag cccgtggact tcaagaagat aaaggagcgc |
| 4441 | attcgcaacc acaagtaccg cagcctcaac gacctagaga aggacgtcat gctcctgtgc |
| 4501 | cagaacgcac agaccttcaa cctggagggc tccctgatct atgaagactc catcgtcttg |
| 4561 | cagtcggtct tcaccagcgt gcggcagaaa atcgagaagg aggatgacag tgaaggcgag |
| 4621 | gagagtgagg aggaggaaga gggcgaggag gaaggctccg aatccgaatc tcggtccgtc |
| 4681 | aaagtgaaga tcaagcttgg ccggaaggag aaggcacagg accggctgaa gggcggccgg |
| 4741 | cggcggccga gccgagggtc ccgagccaag ccggtcgtga gtgacgatga cagtgaggag |
| 4801 | gaacaagagg aggaccgctc aggaagtggc agcgaagaag actgagcccc gacattccag |
| 4861 | tctcgacccc gagcccctcg ttccagagct gagatggcat aggccttagc agtaacgggt |
| 4921 | agcagcagat gtagtttcag acttggagta aaactgtata aacaaaagaa tcttccatat |
| 4981 | ttatacagca gagaagctgt aggactgttt gtgactggcc ctgtcctggc atcagtagca |
| 5041 | tctgtaacag cattaactgt cttaaagaga gagagagaga attccgaatt ggggaacaca |
| 5101 | cgatacctgt ttttcttttc cgttgctggc agtactgttg cgccgcagtt tggagtcact |
| 5161 | gtagttaagt gtggatgcat gtgcgtcacc gtccactcct cctactgtat tttattggac |
| 5221 | aggtcagact cgccgggggc ccggcgaggg tatgtcagtg tcactggatg tcaaacagta |
| 5281 | ataaattaaa ccaacaacaa aacgcacagc caaaaaaaaa |

SEQ ID NO: 202 Human SMARCA4 Amino Acid Sequence Isoform F
(NP_001122320.1)

| | |
|---|---|
| 1 | mstpdpplgg tprpgpspgp gpspgamlgp spgpspgsah smmgpspgpp saghpiptqg |
| 61 | pggypqdnmh qmhkpmesmh ekgmsddpry nqmkgmgmrs gghagmgppp spmdqhsqgy |
| 121 | psplggseha sspvpasgps sgpqmssgpg gapldgadpq algqqnrgpt pfnqnqlhql |
| 181 | raqimaykml argqplpdhl qmavqgkrpm pgmqqqmptl pppsvsatgp gpgpgpgpgp |
| 241 | gpgpappnys rphgmggpnm pppgpsgvpp gmpgqppggp pkpwpegpma naaaptstpq |
| 301 | klippqptgr pspappavpp aaspvmppqt qspgqpaqpa pmvplhqkqs ritpiqkprg |
| 361 | ldpveilqer eyrlqariah riqelenlpg slagdlrtka tielkalrll nfqrqlrqev |
| 421 | vvcmrrdtal etalnakayk rskrqslrea riteklekqq kieqerkrrq khqeylnsil |
| 481 | qhakdfkeyh rsvtgkiqkl tkavatyhan tereqkkene riekermrrl maedeegyrk |
| 541 | lidqkkdkrl ayllqqtdey vanltelvrq hkaaqvakek kkkkkkkkae naegqtpaig |
| 601 | pdgepldets qmsdlpvkvi hvesgkiltg tdapkagqle awlemnpgye vaprsdsees |
| 661 | gseeeeeeee eeqpqaaqpp tlpveekkki pdpdsddvse vdarhiiena kqdvddeygv |
| 721 | sqalarglqs yyavahavte rvdkqsalmv ngvlkqyqik glewlvslyn nnlngilade |
| 781 | mglgktiqti alitylmehk ringpfliiv plstlsnway efdkwapsvv kvsykgspaa |
| 841 | rrafvpqlrs gkfnvlltty eyiikdkhil akirwkymiv deghrmknhh ckltqvlnth |
| 901 | yvaprrlllt gtplqnklpe lwallnfllp tifkscstfe qwfnapfamt gekvdlneee |
| 961 | tiliirrlhk vlrpfllrrl kkeveaqlpe kveyvikcdm salqrvlyrh mqakgvlltd |
| 1021 | gsekdkkgkg gtktlmntim qlrkicnhpy mfqhieesfs ehlgftggiv qgldlyrasg |
| 1081 | kfelldrilp klratnhkvl lfcqmtslmt imedyfayrg fkylrldgtt kaedrgmllk |
| 1141 | tfnepgseyf ifllstragg lglnlqsadt viifdsdwnp hqdlqaqdra hrigqqnevr |
| 1201 | vlrlctvnsv eekilaaaky klnvdqkviq agmfdqksss herraflqai leheeqdeee |
| 1261 | devpddetvn qmiarheeef dlfmrmdldr rreearnpkr kprlmeedel pswiikddae |
| 1321 | verltceeee ekmfgrgsrh rkevdysdsl tekqwlkaie egtleeieee vrqkkssrkr |
| 1381 | krdsdagsst pttstrsrdk ddeskkqkkr grppaeklsp nppnltkkmk kivdavikyk |
| 1441 | dssgrqlsev fiqlpsrkel peyyelirkp vdfkkikeri rnhkyrsind lekdvmllcq |
| 1501 | naqtfnlegs liyedsivlq svftsvrqki ekeddsegee seeeeegeee gsesesrsvk |
| 1561 | vkiklgrkek aqdrlkggrr rpsrgsrakp vvsdddseee qeedrsgsgs eed |

SEQ ID NO: 203 Human SMARCA4 cDNA Sequence Variant 7 (NM_001128848.1,
CDS: 1-4842)

| | |
|---|---|
| 1 | atgtccactc cagacccacc cctgggcgga actcctcggc caggtccttc cccgggccct |
| 61 | ggcccttccc ctggagccat gctgggccct agcccgggtc cctcgccggg ctccgcccac |
| 121 | agcatgatgg ggcccagccc agggccgccc tcagcaggac accccatccc cacccagggg |
| 181 | cctggagggt accctcagga caacatgcac cagatgcaca agcccatgga gtccatgcat |
| 241 | gagaagggca tgtcggacga cccgcgctac aaccagatga aaggaatggg gatgcggtca |
| 301 | gggggccatg ctgggatggg gcccccgccc agccccatgg accagcactc ccaaggttac |
| 361 | ccctcgcccc tgggtggctc tgagcatgcc tctagtccag ttccagccag tggcccgtct |
| 421 | tcggggcccc agatgtcttc cgggccagga ggtgccccgc tggatggtgc tgacccccag |
| 481 | gccttggggc agcagaaccg gggcccaacc ccatttaacc agaaccagct gcaccagctc |
| 541 | agagctcaga tcatggccta caagatgctg gccagggggc agcccctccc cgaccacctg |
| 601 | cagatggcgg tgcagggcaa gcggccgatg cccgggatgc agcagcagat gccaacgcta |
| 661 | cctccaccct cggtgtccgc aacaggaccc ggccctggcc ctggccctgg ccccggcccg |
| 721 | ggtcccggcc cggcacctcc aaattacagc aggcctcatg gtatgggagg gcccaacatg |
| 781 | cctcccccag gaccctcggg cgtgcccccc gggatgccag gccagcctcc tggagggcct |
| 841 | cccaagccct ggcctgaagg acccatggcg aatgctgctg cccccacgag cacccctcag |
| 901 | aagctgattc ccccgcagcc aacgggccgc ccttcccccg cgccccctgc cgtcccaccc |
| 961 | gccgcctcgc ccgtgatgcc accgcagacc cagtcccccg ggcagccggc ccagcccgcg |
| 1021 | cccatggtgc cactgcacca gaagcagagc cgcatcaccc ccatccagaa gccgcggggc |
| 1081 | ctcgaccctg tggagatcct gcaggagcgc gagtacaggc tgcaggctcg catcgcacac |
| 1141 | cgaattcagg aacttgaaaa ccttcccggg tccctggccg gggatttgcg aaccaaagcg |
| 1201 | accattgagc tcaaggccct caggctgctg aacttccaga ggcagctgcg ccaggaggtg |
| 1261 | gtggtgtgca tgcggaggga cacagcgctg gagacagccc tcaatgctaa ggcctacaag |
| 1321 | cgcagcaagc gccagtccct gcgcgaggcc cgcatcactg agaagctgga gaagcagcag |
| 1381 | aagatcgagc aggagcgcaa gcgccggcag aagcaccagg aatacctcaa tagcattctc |
| 1441 | cagcatgcca aggatttcaa ggaatatcac agatccgtca caggcaaaat ccagaagctg |
| 1501 | accaaggcag tggccacgta ccatgccaac acggagcggg agcagaagaa agagaacgag |
| 1561 | cggatcgaga aggagcgcat gcggaggctc atggctgaag atgaggaggg gtaccgcaag |
| 1621 | ctcatcgacc agaagaagga caagcgcctg gcctacctct tgcagcagac agacgagtac |
| 1681 | gtggctaacc tcacggagct ggtgcggcag cacaaggctg cccaggtcgc caaggagaaa |
| 1741 | aagaagaaaa agaaaaagaa gaaggcagaa aatgcagaag gacagacgcc tgccattggg |
| 1801 | ccggatggcg agcctctgga cgagaccagc cagatgagcg acctcccggt gaaggtgatc |
| 1861 | cacgtggaga gtgggaagat cctcacaggc acagatgccc ccaaagccgg gcagctggag |
| 1921 | gcctggctcg agatgaaccc ggggtatgaa gtagctccga ggtctgatag tgaagaaagt |
| 1981 | ggctcagaag aagaggaaga ggaggaggag gaagagcagc cgcaggcagc acagcctccc |
| 2041 | accctgcccg tggaggagaa gaagaagatt ccagatccag acagcgatga cgtctctgag |
| 2101 | gtggacgcgc ggcacatcat tgagaatgcc aagcaagatg tcgatgatga atatggcgtg |
| 2161 | tcccaggccc ttgcacgtgg cctgcagtcc tactatgccg tggcccatgc tgtcactgag |
| 2221 | agagtggaca agcagtcagc gcttatggtc aatggtgtcc tcaaacagta ccagatcaaa |
| 2281 | ggtttggagt ggctggtgtc cctgtacaac aacaacctga acggcatcct ggccgacgag |
| 2341 | atgggcctgg ggaagaccat ccagaccatc gcgctcatca cgtacctcat ggagcacaaa |
| 2401 | cgcatcaatg ggcccttcct catcatcgtg cctctctcaa cgctgtccaa ctgggcgtac |
| 2461 | gagtttgaca agtgggcccc ctccgtggtg aaggtgtctt acaagggatc cccagcagca |
| 2521 | agacgggcct ttgtccccca gctccggagt gggaagttca acgtcttgct gacgacgtac |
| 2581 | gagtacatca tcaaagacaa gcacatcctc gccaagatcc gttggaagta catgattgtg |
| 2641 | gacgaaggtc accgcatgaa gaaccaccac tgcaagctga cgcaggtgct caacacgcac |
| 2701 | tatgtggcac cccgccgcct gctgctgacg ggcacaccgc tgcagaacaa gcttcccgag |
| 2761 | ctctgggcgc tgctcaactt cctgctgccc accatcttca agagctgcag caccttcgag |
| 2821 | cagtggttta acgcaccctt tgccatgacc ggggaaaagg tggacctgaa tgaggaggaa |
| 2881 | accattctca tcatccggcg tctccacaaa gtgctgcggc ccttcttgct ccgacgactc |
| 2941 | aagaaggaag tcgaggccca gttgcccgaa aaggtggagt acgtcatcaa gtgcgacatg |
| 3001 | tctgcgctgc agcgagtgct ctaccgccac atgcaggcca agggcgtgct gctgactgat |
| 3061 | ggctccgaga aggacaagaa gggcaaaggC ggcaccaaga ccctgatgaa caccatcatg |
| 3121 | cagctgcgga agatctgcaa ccacccctac atgttccagc acatcgagga gtccttttcc |
| 3181 | gagcacttgg ggttcactgg cggcattgtc caagggctgg acctgtaccg agcctcgggt |
| 3241 | aaatttgagc ttcttgatag aattcttccc aaactccgag caaccaacca caaagtgctg |
| 3301 | ctgttctgcc aaatgacctc cctcatgacc atcatggaag attactttgc gtatcgcggc |
| 3361 | tttaaatacc tcaggcttga tggaaccacg aaggcggagg accggggcat gctgctgaaa |
| 3421 | accttcaacg agcccggctc tgagtacttc atcttcctgc tcagcacccg ggctgggggg |
| 3481 | ctcggcctga acctccagtc ggcagacact gtgatcattt ttgacagcga ctggaatcct |
| 3541 | caccaggacc tgcaagcgca ggaccgagcc caccgcatcg ggcagcagaa cgaggtgcgt |
| 3601 | gtgctccgcc tctgcaccgt caacagcgtg gaggagaaga tcctagctgc agccaagtac |
| 3661 | aagctcaacg tggaccagaa ggtgatccag gccggcatgt tcgaccagaa gtcctccagc |
| 3721 | catgagcggc gcgccttcct gcaggccatc ctggagcacg aggagcagga tgaggaggaa |
| 3781 | gacgaggtgc ccgacgacga gaccgtcaac cagatgatcg cccggcacga ggaggagttt |
| 3841 | gatctgttca tgcgcatgga cctggaccgc aggcgcgagg aggcccgcaa ccccaagcgg |
| 3901 | aagccgcgcc tcatggagga ggacgagctc ccctcgtgga tcatcaagga cgacgcggag |
| 3961 | gtggagcggc tgacctgtga ggaggaggag gagaagatgt tcggccgtgg ctcccgccac |
| 4021 | cgcaaggagg Tggactacag cgactcactg acggagaagc agtggctcaa ggccatcgag |
| 4081 | gagggcacgc tggaggagat cgaagaggag gtccggcaga agaaatcatc acggaagcgc |
| 4141 | aagcgagaca gcgacgccgg ctcctccacc ccgaccacca gcacccgcag ccgcgacaag |
| 4201 | gacgacgaga gcaagaagca gaagaagcgc gggcggccgc ctgccgagaa actctcccct |
| 4261 | aacccaccca acctcaccaa gaagatgaag aagattgtgg atgccgtgat caagtacaag |
| 4321 | gacagcagtg gacgtcagct cagcgaggtc ttcatccagc tgccctcgcg aaaggagctg |
| 4381 | cccgagtact acgagctcat ccgcaagccc gtggacttca agaagataaa ggagcgcatt |
| 4441 | cgcaaccaca agtaccgcag cctcaacgac ctagagaagg acgtcatgct cctgtgccag |
| 4501 | aacgcacaga ccttcaacct ggagggctcc ctgatctatg aagactccat cgtcttgcag |
| 4561 | tcggtcttca ccagcgtgcg gcagaaaatc gagaaggagg atgacagtga aggcgaggag |
| 4621 | agtgaggagg aggaagaggg cgaggaggaa ggctccgaat ccgaatctcg gtccgtcaaa |
| 4681 | gtgaagatca agcttggccg gaaggagaag gcacaggacc ggctgaaggg cggccggcgg |
| 4741 | cggccgagcc gagggtcccg agccaagccg gtcgtgagtg acgatgacag tgaggaggaa |
| 4801 | caagaggagg accgctcagg aagtggcagc gaagaagact gagccccgac attccagtct |
| 4861 | cgaccccgag cccctcgttc cagagctgag atggcatagg ccttagcagt aacgggtagc |
| 4921 | agcagatgta gtttcagact tggagtaaaa ctgtataaac aaaagaatct tccatattta |
| 4981 | tacagcagag aagctgtagg actgtttgtg actggccctg tcctggcatc agtagcatct |
| 5041 | gtaacagcat taactgtctt aaagagagag agagagaatt ccgaattggg gaacacacga |
| 5101 | tacctgtttt tcttttccgt tgctggcagt actgttgcgc cgcagtttgg agtcactgta |
| 5161 | gttaagtgtg gatgcatgtg cgtcaccgtc cactcctcct actgtatttt attggacagg |
| 5221 | tcagactcgc cgggggcccg gcgagggtat gtcagtgtca ctggatgtca aacagtaata |
| 5281 | aattaaacca acaacaaaac gcacagccaa aaaaaaa |

SEQ ID NO: 204 Mouse SMARCA4 cDNA Sequence variant 1 (NM_001174078.1;
CDS: 261-5114)

| | |
|---|---|
| 1 | ggcaagtgga gcgggtagac agggaggcgg gggcgcgcgg cgggcgcgtg cggtgggggg |
| 61 | gggtggcctg gcgaagccca gcgggcgcgc gcgcgaggct ttcccactcg cttggcagcg |
| 121 | gcggagacgg cttctttgtt tcctgaggag aagcgagacg cccactctgt ccccgacccc |
| 181 | tcgtggaggg ttgggggcgg cgccaggaag gttacggcgc cgttacctcc aggagaccag |
| 241 | tgcctgtagc tccagtaaag atgtctactc cagacccacc cttgggtggg actcctcggc |
| 301 | ctggtccttc cccaggccct ggtccttcac ctggtgcaat gctgggtcct agccctggcc |
| 361 | cctcaccagg ttctgcccac agcatgatgg ggccaagccc aggacctcct tcagcaggac |
| 421 | atcccatgcc cacccagggg cctggagggt acccccagga caacatgcat cagatgcaca |
| 481 | agcctatgga gtccatgcac gagaagggca tgcctgatga cccacgatac aaccagatga |
| 541 | aagggatggg catgcggtca ggggcccaca caggcatggc acctccacct agtcccatgg |
| 601 | accagcattc tcaaggttac ccctcacccc tcggcggctc tgaacatgcc tccagtcctg |
| 661 | tcccagccag tggcccatct tcaggccccc agatgtcctc tgggccagga ggggccccac |
| 721 | tagatggttc tgatccccag gccttgggac agcaaaacag aggcccaacc ccatttaacc |
| 781 | agaaccagct gcatcaactc agagctcaga taatggccta caagatgttg gccaggggcc |
| 841 | agccattgcc cgaccacctg cagatggccg tgcaaggcaa gcggccgatg cctggaatgc |
| 901 | agcaacagat gccaacacta cctccaccct cagtgtccgc cacaggaccc ggacctggac |
| 961 | ccggccctgg ccctggccct ggcccaggac cagcccctcc aaattacagt agaccccatg |
| 1021 | gtatgggagg gcccaacatg cctcccccag gaccctcagg tgtgcccccc gggatgcctg |
| 1081 | gtcagccgcc tggagggcct cccaagccat ggcctgaagg acccatggcc aatgctgctg |
| 1141 | cccccacaag caccccacag aagctgattc ctccgcaacc aacaggccgt ccttcacctg |
| 1201 | cacctcctgc tgtcccgcct gctgcctcac ctgtaatgcc accacaaaca cagtccccag |
| 1261 | ggcagccagc ccagcctgct ccattggtgc cactgcacca gaagcagagc cgaatcaccc |
| 1321 | ccatccagaa gccccgaggc cttgaccctg tggagatcct acaagagcgg gagtacaggc |
| 1381 | ttcaggctcg aatcgcacac agaattcagg aacttgaaaa cctccctggg tccctggctg |
| 1441 | gggaccttcg aaccaaagca accatcgaac tcaaggccct taggttgctg aacttccaga |
| 1501 | ggcagctgcg ccaggaggtg gtggtgtgca tgcgaagaga cacagccctg gagacagccc |
| 1561 | tcaatgccaa ggcctacaag cgcagcaaac gtcagtcact acgggaggcc cgcatcactg |
| 1621 | agaagttgga gaagcagcag aagattgaac aggagcgcaa gcgccgccag aagcaccagg |
| 1681 | agtacctcaa cagcattctg cagcatgcca aggacttcag ggagtatcac agatcagtca |
| 1741 | caggcaaact ccagaaactc accaaggctg tggccaccta ccatgccaac actgagcggg |
| 1801 | agcagaagaa agaaaatgag cgcattgaga aggagcgaat gcggaggctt atggctgaag |
| 1861 | atgaggaggg ctaccgcaaa ctcattgacc agaagaagga caagcgcctg gcctaccttc |
| 1921 | tgcagcagac agatgagtat gtggccaacc tcacagagct ggtgcggcag cacaaagctg |
| 1981 | cccaggttgc caaggagaag aagaagaaaa agaaaaagaa gaaggcagaa aatgctgaag |
| 2041 | gacagacacc tgctattgga ccagatggtg agcctctgga tgagaccagc cagatgagtg |
| 2101 | acctccctgt gaaggtgatc cacgtggaga gtggcaagat cctcactggc acagatgccc |
| 2161 | caaaagccgg gcagctggaa gcctggcttg aaatgaaccc agggtatgaa gtagccccca |
| 2221 | ggtcagacag tgaagaaagt ggctctgaag aggaggagga ggaggaggaa gaggagcagc |
| 2281 | ctcagcccgc acagccccct acactgcctg tggaagaaaa gaagaagatt ccagacccag |
| 2341 | acagcgatga tgtctctgag gtggacgccc gacacattat tgagaacgcc aagcaagatg |
| 2401 | tggacgatga gtacggtgtg tcccaggccc ttgctcgtgg cctgcagtct tactatgctg |
| 2461 | tggcccatgc agtcacagag agagtagata agcagtccgc cctcatggtc aacggtgtcc |
| 2521 | tcaaacagta ccagatcaag ggtttggagt ggctggtgtc cctgtacaac aacaacctga |
| 2581 | atggcatcct ggctgatgag atggggctgg ggaagaccat ccagaccatc gcgctcatca |
| 2641 | catacctcat ggagcacaag cgcatcaacg ggcctttcct catcatcgtg cctctctcga |
| 2701 | cactgtcaaa ctgggcgtat gaatttgaca agtgggcccc ctctgtggtg aaggtttctt |
| 2761 | acaagggctc tccagctgca aggcgagctt ttgtcccaca gcttcgcagt gggaagttca |
| 2821 | acgtcttact gaccacctat gaatatatca tcaaagacaa gcatatccta gccaagatcc |
| 2881 | gctggaagta catgattgtg gatgaaggcc accgcatgaa aaaccaccac tgcaagttga |
| 2941 | cgcaggtcct taacacacac tacgtggccc ctcggcgcct gcttcttaca ggcacaccac |
| 3001 | tgcagaacaa gctaccggag ctctgggccc tgcttaactt cctgctcccc actatcttca |
| 3061 | agagctgcag caccttcgaa cagtggttca atgcaccctt tgccatgact ggagaaaagg |
| 3121 | tggacctgaa tgaagaggag actatcctca ttattcgtcg cctacacaaa gttctgcggc |
| 3181 | ccttcctgct gcggcggctc aagaaggaag ttgaagccca gctccctgag aaggtagagt |
| 3241 | atgtcatcaa atgcgacatg tcagccctgc agcgtgtgct gtaccgtcac atgcaggcca |
| 3301 | aaggtgtgct gctgactgac ggctccgaga aggacaagaa gggcaaaggt ggcaccaaga |
| 3361 | cactgatgaa cactattatg caactgcgta agatctgcaa ccacccctac atgttccagc |
| 3421 | acatcgagga gtccttttct gagcacttgg ggttcaccgg cggcatcgtg caaggattgg |
| 3481 | acctttaccg tgcctcaggg aaatttgaac ttcttgatag aattctaccc aaactccgtg |
| 3541 | caacgaacca taaagtgctc ctcttttgcc aaatgacctc cctcatgacc atcatggaag |
| 3601 | actactttgc ataccgtggc ttcaaatacc tcaggcttga tggaaccaca aaagcagaag |
| 3661 | accggggcat gctgttgaaa acctttaatg aacctggctc tgagtatttc attttcctgc |
| 3721 | tcagtacccg tgctgggggg ctgggcctga atctgcagtc agctgacact gtgatcatct |
| 3781 | ttgacagtga ctggaatccc caccaggacc tgcaagcaca ggatcgagcc catcgcattg |
| 3841 | gacagcagaa tgaggtgcgt gttcttcgcc tgtgcacggt caacagtgtg gaagagaaga |
| 3901 | tactggctgc tgccaaatac aaactcaatg tggatcagaa ggtgatccag gcaggcatgt |
| 3961 | tcgaccagaa gtcgtccagc catgagaggc gtgccttcct gcaggccatc ctggagcacg |
| 4021 | aggagcagga tgaggaggaa gatgaggtgc ctgatgatga gaccgtcaac cagatgattg |
| 4081 | cccggcacga agaagagttt gacctcttca tgcgcatgga cttggaccgc cggcgtgaag |
| 4141 | aagcccgcaa ccccaagcgg aagccacgcc tgatggaaga ggatgagctc ccatcctgga |
| 4201 | tcatcaagga tgatgccgag gtggagcggc tgacatgtga agaggaagag gagaagatgt |
| 4261 | tcggccgtgg ttctcgccac cgcaaggagg tagactacag cgactcactg acagagaagc |
| 4321 | agtggctcaa gaccctgaag gctatcgagg agggcacgct ggaggagatc gaagaggagg |
| 4381 | tccggcagaa gaaatcttca cgtaagcgta agcgagacag cgaggccggc tcctccaccc |
| 4441 | cgaccaccag cacccgcagc cgtgacaagg atgaggagag caagaagcag aagaaacgtg |
| 4501 | ggcggccacc tgctgagaag ctgtccccaa acccacctaa cctcaccaag aagatgaaga |
| 4561 | agatcgtgga tgctgtgatc aagtacaaag acagcagcag tggacgtcag ctcagcgagg |
| 4621 | tgttcatcca gctcccctct cgcaaggagc ttcctgagta ctatgagctc atccgaaagc |
| 4681 | ctgtggactt caagaagatc aaggaacgca tccgaaacca caagtaccgc agcctcaatg |
| 4741 | acctggagaa ggatgtgatg ctgctgtgcc agaacgctca gacgttcaac ctcgagggtt |
| 4801 | ccctgatcta tgaggactcc atcgtcctgc agtctgtctt caccagcgta cggcagaaga |
| 4861 | ttgagaagga ggacgacagt gaaggcgagg aaagcgagga ggaggaggag ggcgaggagg |
| 4921 | aaggctccga gtctgagtcc cgctccgtca aggtgaagat caagctgggc cgcaaggaga |
| 4981 | aggcccagga ccgactcaag gggggccgcc ggcggccaag ccggggatcc cgggccaagc |
| 5041 | cggttgtgag tgacgatgac agtgaggagg agcaggagga ggaccgctca ggaagtggca |
| 5101 | gtgaggaaga ctgaaccaga cattcctgag tcctgacccc gaggcgctcg tcccagccaa |
| 5161 | gatggagtag cccttagcag tgatgggtag caccagatgt agtttcgaac ttggagaact |
| 5221 | gtacacatgc aatcttccac atttttaggc agagaagtat aggcctgtct gtcggccctg |
| 5281 | gcctggcctc gagtctctac cagcattaac tgtctagaga ggggacctcc tgggagcacc |
| 5341 | atccacctcc ccaggcccca gtcactgtag ctcagtggat gcatgcgcgt gccggccgct |
| 5401 | ccttgtactg tatcttactg gacagggcca gctctccagg aggctcacag gcccagcggg |
| 5461 | tatgtcagtg tcactggagt cagacagtaa taaattaaag caatgacaag ccaccactgg |
| 5521 | ctccctggac tccttgctgt cagcagtggc tccggggcca cagagaagaa agaaagactt |
| 5581 | ttaggaactg ggtctaactt atgggcaaag tacttgcctt gccaggtgta tgggttttgc |
| 5641 | attcccatca cccacacacc ctaaacaagc caagtcagtg agcttcaagt tagagcctcc |
| 5701 | acctcaatgt gtacgtggaa agcaatcaaa gatgatgcct agcatccacc tctggccctc |
| 5761 | atgtgcagat gtacacacac tgaattacat acacgggaca cacacatcca cacggaggca |
| 5821 | gtccatgact tgcactgggg agatggtacc ataggcgaaa gtgccacagg cacagggcca |
| 5881 | ggctaattta gtcctgcagt cctgtgctct taagatgaag gcacaaagag gaaccccagg |
| 5941 | cgctccaact agcatgccag gcagtgacaa gaccctgctt caaatgaatc agagcccaca |
| 6001 | ttcagtattg ccctcttacc cgatgcgatg cccatgccct cacatatgaa tgtgtatata |
| 6061 | tacatacata cgtaaaataa ttctttttta aattatagac atttttgtgt gaatgttttg |
| 6121 | cctgaatgtg tgtgtgtgtg tgtgtgtgtg tgtgtgtgtg tgtgtgtgtg tatcaagtac |
| 6181 | attcctagag cctacagagg tcaagggagg gcattggatc tggaactgga gtcacatgag |
| 6241 | gctgtgagca actgtgtggg ttcctgggcc tttgcaacag cagttagtac tcttcaccac |
| 6301 | tgagccattt ctccaatctc aaaaagaagc attcttttaa atgaagactg aaataaataa |
| 6361 | gtaggacttg ccttgg |

SEQ ID NO: 205 Mouse SMARCA4 Amino Acid Sequence isoform 1
(NP_001167549.1)

| | |
|---|---|
| 1 | mstpdpplgg tprpgpspgp gpspgamlgp spgpspgsah smmgpspgpp saghpmptqg |
| 61 | pggypqdnmh qmhkpmesmh ekgmpddpry nqmkgmgmrs gahtgmappp spmdqhsqgy |
| 121 | psplggseha sspvpasgps sgpqmssgpg gapldgsdpq algqqnrgpt pfnqnqlhql |
| 181 | raqimaykml argqplpdhl qmavqgkrpm pgmqqqmptl pppsvsatgp gpgpgpgpgp |
| 241 | gpgpappnys rphgmggpnm pppgpsgvpp gmpgqppggp pkpwpegpma naaaptstpq |
| 301 | klippqptgr pspappavpp aaspvmppqt qspgqpaqpa plvplhqkqs ritpiqkprg |
| 361 | ldpveilqer eyrlqariah riqelenlpg slagdlrtka tielkalrll nfqrqlrqev |
| 421 | vvcmrrdtal etalnakayk rskrqslrea riteklekqq kieqerkrrq khqeylnsil |
| 481 | qhakdfreyh rsvtgklqkl tkavatyhan tereqkkene riekermrrl maedeegyrk |
| 541 | lidqkkdkrl ayllqqtdey vanltelvrq hkaaqvakek kkkkkkkkae naegqtpaig |
| 601 | pdgepldets qmsdlpvkvi hvesgkiltg tdapkagqle awlemnpgye vaprsdsees |
| 661 | gseeeeeeee eeqpqpaqpp tlpveekkki pdpdsddvse vdarhiiena kqdvddeygv |
| 721 | sqalarglqs yyavahavte rvdkqsalmv ngvlkqyqik glewlvslyn nnlngilade |
| 781 | mglgktiqti alitylmehk ringpfliiv plstlsnway efdkwapsvv kvsykgspaa |
| 841 | rrafvpqlrs gkfnvlltty eyiikdkhil akirwkymiv deghrmknhh ckltqvlnth |
| 901 | yvaprilllt gtplqnklpe lwallnfllp tifkscstfe qwfnapfamt gekvdlneee |
| 961 | tiliirrlhk vlrpfllrrl kkeveaqlpe kveyvikcdm salqrvlyrh mqakgvlltd |
| 1021 | gsekdkkgkg gtktlmntim qlrkicnhpy mfqhieesfs ehlgftggiv qgldlyrasg |
| 1081 | kfelldrilp klratnhkvl lfcqmtslmt imedyfayrg fkylrldgtt kaedrgmllk |
| 1141 | tfnepgseyf ifllstragg lglnlqsadt viifdsdwnp hqdlqaqdra hrigqqnevr |
| 1201 | vlrlctvnsv eekilaaaky klnvdqkviq agmfdqksss herraflqai leheeqdeee |
| 1261 | devpddetvn qmiarheeef dlfmrmdldr rreearnpkr kprlmeedel pswiikddae |
| 1321 | verltceeee ekmfgrgsrh rkevdysdsl tekqwlktlk aieegtleei eeevrqkkss |
| 1381 | rkrkrdseag sstpttstrs rdkdeeskkq kkrgrppaek lspnppnltk kmkkivdavi |
| 1441 | kykdsssgrq lsevfiqlps rkelpeyyel irkpvdfkki kerirnhkyr slndlekdvm |
| 1501 | llcqnaqtfn legsliyeds ivlqsvftsv rqkiekedds egeeseeeee geeegseses |
| 1561 | rsvkvkiklg rkekagdrlk ggrrrpsrgs rakpvvsddd seeeqeedrs gsgseed |

SEQ ID NO: 206 Mouse SMARCA4 cDNA Sequence variant 2 (NM_011417.3)

| | |
|---|---|
| 1 | ggcaagtgga gcgggtagac agggaggcgg gggcgcgcgg cgggcgcgtg cggtgggggg |
| 61 | gggtggcctg gcgaagccca gcgggcgcgc gcgcgaggct ttcccactcg cttggcagcg |
| 121 | gcggagacgg cttctttgtt tcctgaggag aagcgagacg cccactctgt ccccgacccc |
| 181 | tcgtggaggg ttgggggcgg cgccaggaag gttacggcgc cgttacctcc aggagaccag |
| 241 | tgcctgtagc tccagtaaag atgtctactc cagacccacc cttgggtggg actcctcggc |
| 301 | ctggtccttc cccaggccct ggtccttcac ctggtgcaat gctgggtcct agccctggcc |
| 361 | cctcaccagg ttctgcccac agcatgatgg ggccaagccc aggacctcct tcagcaggac |
| 421 | atcccatgcc cacccagggg cctggagggt acccccagga caacatgcat cagatgcaca |
| 481 | agcctatgga gtccatgcac gagaagggca tgcctgatga cccacgatac aaccagatga |
| 541 | aagggatggg catgcggtca ggggcccaca caggcatggc acctccacct agtcccatgg |
| 601 | accagcattc tcaaggttac ccctcacccc tcggcggctc tgaacatgcc tccagtcctg |
| 661 | tcccagccag tggcccatct tcaggccccc agatgtcctc tgggccagga ggggccccac |
| 721 | tagatggttc tgatccccag gccttgggac agcaaaacag aggcccaacc ccatttaacc |
| 781 | agaaccagct gcatcaactc agagctcaga taatggccta caagatgttg gccaggggcc |
| 841 | agccattgcc cgaccacctg cagatggccg tgcaaggcaa gcggccgatg cctggaatgc |
| 901 | agcaacagat gccaacacta cctccaccct cagtgtccgc cacaggaccc ggacctggac |
| 961 | ccggccctgg ccctggccct ggcccaggac cagcccctcc aaattacagt agaccccatg |
| 1021 | gtatgggagg gcccaacatg cctcccccag gaccctcagg tgtgcccccc gggatgcctg |
| 1081 | gtcagccgcc tggagggcct cccaagccat ggcctgaagg acccatggcc aatgctgctg |
| 1141 | cccccacaag caccccacag aagctgattc ctccgcaacc aacaggccgt ccttcacctg |
| 1201 | cacctcctgc tgtcccgcct gctgcctcac ctgtaatgcc accacaaaca cagtccccag |
| 1261 | ggcagccagc ccagcctgct ccattggtgc cactgcacca gaagcagagc cgaatcaccc |
| 1321 | ccatccagaa gccccgaggc cttgaccctg tggagatcct acaagagcgg gagtacaggc |
| 1381 | ttcaggctcg aatcgcacac agaattcagg aacttgaaaa cctccctggg tccctggctg |
| 1441 | gggaccttcg aaccaaagca accatcgaac tcaaggccct taggttgctg aacttccaga |
| 1501 | ggcagctgcg ccaggaggtg gtggtgtgca tgcgaagaga cacagccctg gagacagccc |
| 1561 | tcaatgccaa ggcctacaag cgcagcaaac gtcagtcact acgggaggcc cgcatcactg |
| 1621 | agaagttgga gaagcagcag aagattgaac aggagcgcaa gcgccgccag aagcaccagg |
| 1681 | agtacctcaa cagcattctg cagcatgcca aggacttcag ggagtatcac agatcagtca |
| 1741 | caggcaaact ccagaaactc accaaggctg tggccaccta ccatgccaac actgagcggg |
| 1801 | agcagaagaa agaaaatgag cgcattgaga aggagcgaat gcggaggctt atggctgaag |
| 1861 | atgaggaggg ctaccgcaaa ctcattgacc agaagaagga caagcgcctg gcctaccttc |
| 1921 | tgcagcagac agatgagtat gtggccaacc tcacagagct ggtgcggcag cacaaagctg |
| 1981 | cccaggttgc caaggagaag aagaagaaaa agaaaaagaa gaaggcagaa aatgctgaag |
| 2041 | gacagacacc tgctattgga ccagatggtg agcctctgga tgagaccagc cagatgagtg |
| 2101 | acctccctgt gaaggtgatc cacgtggaga gtggcaagat cctcactggc acagatgccc |
| 2161 | caaaagccgg gcagctggaa gcctggcttg aaatgaaccc agggtatgaa gtagccccca |
| 2221 | ggtcagacag tgaagaaagt ggctctgaag aggaggagga ggaggaggaa gaggagcagc |
| 2281 | ctcagcccgc acagccccct acactgcctg tggaagaaaa gaagaagatt ccagacccag |
| 2341 | acagcgatga tgtctctgag gtggacgccc gacacattat tgagaacgcc aagcaagatg |
| 2401 | tggacgatga gtacggtgtg tcccaggccc ttgctcgtgg cctgcagtct tactatgctg |
| 2461 | tggcccatgc agtcacagag agagtagata agcagtccgc cctcatggtc aacggtgtcc |
| 2521 | tcaaacagta ccagatcaag ggtttggagt ggctggtgtc cctgtacaac aacaacctga |
| 2581 | atggcatcct ggctgatgag atggggctgg ggaagaccat ccagaccatc gcgctcatca |
| 2641 | catacctcat ggagcacaag cgcatcaacg ggcctttcct catcatcgtg cctctctcga |
| 2701 | cactgtcaaa ctgggcgtat gaatttgaca agtgggcccc ctctgtggtg aaggtttctt |
| 2761 | acaagggctc tccagctgca aggcgagctt ttgtcccaca gcttcgcagt gggaagttca |
| 2821 | acgtcttact gaccacctat gaatatatca tcaaagacaa gcatatccta gccaagatcc |
| 2881 | gctggaagta catgattgtg gatgaaggcc accgcatgaa aaaccaccac tgcaagttga |
| 2941 | cgcaggtcct taacacacac tacgtggccc ctcggcgcct gcttcttaca ggcacaccac |
| 3001 | tgcagaacaa gctaccggag ctctgggccc tgcttaactt cctgctcccc actatcttca |
| 3061 | agagctgcag caccttcgaa cagtggttca atgcaccctt tgccatgact ggagaaaagg |
| 3121 | tggacctgaa tgaagaggag actatcctca ttattcgtcg cctacacaaa gttctgcggc |
| 3181 | ccttcctgct gcggcggctc aagaaggaag ttgaagccca gctccctgag aaggtagagt |
| 3241 | atgtcatcaa atgcgacatg tcagccctgc agcgtgtgct gtaccgtcac atgcaggcca |
| 3301 | aaggtgtgct gctgactgac ggctccgaga aggacaagaa gggcaaaggt ggcaccaaga |
| 3361 | cactgatgaa cactattatg caactgcgta agatctgcaa ccacccctac atgttccagc |
| 3421 | acatcgagga gtccttttct gagcacttgg ggttcaccgg cggcatcgtg caaggattgg |
| 3481 | acctttaccg tgcctcaggg aaatttgaac ttcttgatag aattctaccc aaactccgtg |
| 3541 | caacgaacca taaagtgctc ctcttttgcc aaatgacctc cctcatgacc atcatggaag |
| 3601 | actactttgc ataccgtggc ttcaaatacc tcaggcttga tggaaccaca aaagcagaag |
| 3661 | accggggcat gctgttgaaa acctttaatg aacctggctc tgagtatttc attttcctgc |
| 3721 | tcagtacccg tgctgggggg ctgggcctga atctgcagtc agctgacact gtgatcatct |
| 3781 | ttgacagtga ctggaatccc caccaggacc tgcaagcaca ggatcgagcc catcgcattg |
| 3841 | gacagcagaa tgaggtgcgt gttcttcgcc tgtgcacggt caacagtgtg gaagagaaga |
| 3901 | tactggctgc tgccaaatac aaactcaatg tggatcagaa ggtgatccag gcaggcatgt |
| 3961 | tcgaccagaa gtcgtccagc catgagaggc gtgccttcct gcaggccatc ctggagcacg |
| 4021 | aggagcagga tgaggaggaa gatgaggtgc ctgatgatga gaccgtcaac cagatgattg |
| 4081 | cccggcacga agaagagttt gacctcttca tgcgcatgga cttggaccgc cggcgtgaag |
| 4141 | aagcccgcaa ccccaagcgg aagccacgcc tgatggaaga ggatgagctc ccatcctgga |
| 4201 | tcatcaagga tgatgccgag gtggagcggc tgacatgtga agaggaagag gagaagatgt |
| 4261 | tcggccgtgg ttctcgccac cgcaaggagg tagactacag cgactcactg acagagaagc |
| 4321 | agtggctcaa ggctatcgag gagggcacgc tggaggagat cgaagaggag gtccggcaga |
| 4381 | agaaatcttc acgtaagcgt aagcgagaca gcgaggccgg ctcctccacc ccgaccacca |
| 4441 | gcacccgcag ccgtgacaag gatgaggaga gcaagaagca gaagaaacgt gggcggccac |
| 4501 | ctgctgagaa gctgtcccca aacccaccta acctcaccaa gaagatgaag aagatcgtgg |
| 4561 | atgctgtgat caagtacaaa gacagcagca gtggacgtca gctcagcgag gtgttcatcc |
| 4621 | agctcccctc tcgcaaggag cttcctgagt actatgagct catccgaaag cctgtggact |
| 4681 | tcaagaagat caaggaacgc atccgaaacc acaagtaccg cagcctcaat gacctggaga |
| 4741 | aggatgtgat gctgctgtgc cagaacgctc agacgttcaa cctcgagggt tccctgatct |
| 4801 | atgaggactc catcgtcctg cagtctgtct tcaccagcgt acggcagaag attgagaagg |
| 4861 | aggacgacag tgaaggcgag gaaagcgagg aggaggagga gggcgaggag gaaggctccg |
| 4921 | agtctgagtc ccgctccgtc aaggtgaaga tcaagctggg ccgcaaggag aaggcccagg |
| 4981 | accgactcaa ggggggccgc cggcggccaa gccggggatc ccgggccaag ccggttgtga |
| 5041 | gtgacgatga cagtgaggag gagcaggagg aggaccgctc aggaagtggc agtgaggaag |
| 5101 | actgaaccag acattcctga gtcctgaccc cgaggcgctc gtcccagcca agatggagta |
| 5161 | gcccttagca gtgatgggta gcaccagatg tagtttcgaa cttggagaac tgtacacatg |
| 5221 | caatcttcca catttttagg cagagaagta taggcctgtc tgtcggccct ggcctggcct |
| 5281 | cgagtctcta ccagcattaa ctgtctagag aggggacctc ctgggagcac catccacctc |
| 5341 | cccaggcccc agtcactgta gctcagtgga tgcatgcgcg tgccggccgc tccttgtact |
| 5401 | gtatcttact ggacagggcc agctctccag gaggctcaca ggcccagcgg gtatgtcagt |
| 5461 | gtcactggag tcagacagta ataaattaaa gcaatgacaa gccaccactg gctccctgga |
| 5521 | ctccttgctg tcagcagtgg ctccggggcc acagagaaga aagaaagact tttaggaact |
| 5581 | gggtctaact tatgggcaaa gtacttgcct tgccaggtgt atgggttttg cattcccatc |
| 5641 | acccacacac cctaaacaag ccaagtcagt gagcttcaag ttagagcctc cacctcaatg |
| 5701 | tgtacgtgga aagcaatcaa agatgatgcc tagcatccac ctctggccct catgtgcaga |
| 5761 | tgtacacaca ctgaattaca tacacgggac acacacatcc acacggaggc agtccatgac |
| 5821 | ttgcactggg gagatggtac cataggcgaa agtgccacag gcacagggcc aggctaattt |
| 5881 | agtcctgcag tcctgtgctc ttaagatgaa ggcacaaaga ggaaccccag gcgctccaac |
| 5941 | tagcatgcca ggcagtgaca agaccctgct tcaaatgaat cagagcccac attcagtatt |
| 6001 | gccctcttac ccgatgcgat gcccatgccc tcacatatga atgtgtatat atacatacat |
| 6061 | acgtaaaata attctttttt aaattataga catttttgtg tgaatgtttt gcctgaatgt |
| 6121 | gtgtgtgtgt gtgtgtgtgt gtgtgtgtgt gtgtgtgtgt gtatcaagta cattcctaga |
| 6181 | gcctacagag gtcaagggag ggcattggat ctggaactgg agtcacatga ggctgtgagc |
| 6241 | aactgtgtgg gttcctgggc ctttgcaaca gcagttagta ctcttcacca ctgagccatt |
| 6301 | tctccaatct caaaaagaag cattctttta aatgaagact gaaataaata agtaggactt |
| 6361 | gccttgg |

SEQ ID NO: 207 Mouse SMARCA4 Amino Acid Sequence isoform 2 (NP_035547.2)

| | |
|---|---|
| 1 | mstpdpplgg tprpgpspgp gpspgamlgp spgpspgsah smmgpspgpp saghpmptqg |
| 61 | pggypqdnmh qmhkpmesmh ekgmpddpry nqmkgmgmrs gahtgmappp spmdqhsqgy |
| 121 | psplggseha sspvpasgps sgpqmssgpg gapldgsdpq algqqnrgpt pfnqnqlhql |
| 181 | raqimaykml argqplpdhl qmavqgkrpm pgmqqqmptl pppsvsatgp gpgpgpgpgp |
| 241 | gpgpappnys rphgmggpnm pppgpsgvpp gmpgqppggp pkpwpegpma naaaptstpq |
| 301 | klippqptgr pspappavpp aaspvmppqt qspgqpaqpa plvplhqkqs ritpiqkprg |
| 361 | ldpveilqer eyrlqariah riqelenlpg slagdlrtka tielkalrll nfqrqlrqev |
| 421 | vvcmrrdtal etalnakayk rskrqslrea riteklekqq kiegerkrrq khqeylnsil |
| 481 | qhakdfreyh rsvtgklqkl tkavatyhan tereqkkene riekermrrl maedeegyrk |
| 541 | lidqkkdkrl ayllqqtdey vanltelvrq hkaaqvakek kkkkkkkkae naegqtpaig |
| 601 | pdgepldets qmsdlpvkvi hvesgkiltg tdapkagqle awlemnpgye vaprsdsees |
| 661 | gseeeeeeee eeqpqpaqpp tlpveekkki pdpdsddvse vdarhiiena kqdvddeygv |
| 721 | sqalarglqs yyavahavte rvdkqsalmv ngvlkqyqik glewlvslyn nnlngilade |
| 781 | mglgktiqti alitylmehk ringpfliiv plstlsnway efdkwapsvv kvsykgspaa |
| 841 | rrafvpqlrs gkfnvlltty eyiikdkhil akirwkymiv deghrmknhh ckltqvlnth |
| 901 | yvaprrlllt gtplqnklpe lwallnfllp tifkscstfe qwfnapfamt gekvdlneee |
| 961 | tiliirrlhk vlrpfllrrl kkeveaqlpe kveyvikcdm salqrvlyrh mqakgvlltd |
| 1021 | gsekdkkgkg gtktlmntim qlrkicnhpy mfqhieesfs ehlgftggiv qgldlyrasg |
| 1081 | kfelldrilp klratnhkvl lfcqmtslmt imedyfayrg fkylrldgtt kaedrgmllk |
| 1141 | tfnepgseyf ifllstragg lglnlqsadt viifdsdwnp hqdlqaqdra hrigqqnevr |
| 1201 | vlrlctvnsv eekilaaaky klnvdqkviq agmfdqksss herraflqai leheeqdeee |
| 1261 | devpddetvn qmiarheeef dlfmrmdldr rreearnpkr kprlmeedel pswiikddae |
| 1321 | verltceeee ekmfgrgsrh rkevdysdsl tekqwlkaie egtleeieee vrqkkssrkr |
| 1381 | krdseagsst pttstrsrdk deeskkqkkr grppaeklsp nppnltkkmk kivdavikyk |
| 1441 | dsssgrqlse vfiqlpsrke lpeyyelirk pvdfkkiker irnhkyrsln dlekdvmllc |
| 1501 | qnaqtfnleg sliyedsivl qsvftsvrqk iekeddsege eseeeeegee egsesesrsv |
| 1561 | kvkiklgrke kaqdrlkggr rrpsrgsrak pvvsdddsee eqeedrsgsg seed |

SEQ ID NO: 208 Mouse SMARCA4 cDNA Sequence variant 3 (NM_001174079.1;
CDS: 261-5102)

| | |
|---|---|
| 1 | ggcaagtgga gcgggtagac agggaggcgg gggcgcgcgg cgggcgcgtg cggtgggggg |
| 61 | gggtggcctg gcgaagccca gcgggcgcgc gcgcgaggct ttcccactcg cttggcagcg |
| 121 | gcggagacgg cttctttgtt tcctgaggag aagcgagacg cccactctgt ccccgacccc |
| 181 | tcgtggaggg ttgggggcgg cgccaggaag gttacggcgc cgttacctcc aggagaccag |
| 241 | tgcctgtagc tccagtaaag atgtctactc cagacccacc cttgggtggg actcctcggc |
| 301 | ctggtccttc cccaggccct ggtccttcac ctggtgcaat gctgggtcct agccctggcc |
| 361 | cctcaccagg ttctgcccac agcatgatgg ggccaagccc aggacctcct tcagcaggac |
| 421 | atcccatgcc cacccagggg cctggagggt acccccagga caacatgcat cagatgcaca |
| 481 | agcctatgga gtccatgcac gagaagggca tgcctgatga cccacgatac aaccagatga |
| 541 | aagggatggg catgcggtca ggggcccaca caggcatggc acctccacct agtcccatgg |
| 601 | accagcattc tcaaggttac ccctcacccc tcggcggctc tgaacatgcc tccagtcctg |
| 661 | tcccagccag tggcccatct tcaggccccc agatgtcctc tgggccagga ggggccccac |
| 721 | tagatggttc tgatccccag gccttgggac agcaaaacag aggcccaacc ccatttaacc |
| 781 | agaaccagct gcatcaactc agagctcaga taatggccta caagatgttg gccaggggcc |
| 841 | agccattgcc cgaccacctg cagatggccg tgcaaggcaa gcggccgatg cctggaatgc |
| 901 | agcaacagat gccaacacta cctccaccct cagtgtccgc cacaggaccc ggacctggac |
| 961 | ccggccctgg ccctggccct ggcccaggac cagcccctcc aaattacagt agaccccatg |
| 1021 | gtatgggagg gcccaacatg cctcccccag gaccctcagg tgtgcccccc gggatgcctg |
| 1081 | gtcagccgcc tggagggcct cccaagccat ggcctgaagg acccatggcc aatgctgctg |
| 1141 | cccccacaag caccccacag aagctgattc ctccgcaacc aacaggccgt ccttcacctg |
| 1201 | cacctcctgc tgtcccgcct gctgcctcac ctgtaatgcc accacaaaca cagtccccag |
| 1261 | ggcagccagc ccagcctgct ccattggtgc cactgcacca gaagcagagc cgaatcaccc |
| 1321 | ccatccagaa gccccgaggc cttgaccctg tggagatcct acaagagcgg gagtacaggc |
| 1381 | ttcaggctcg aatcgcacac agaattcagg aacttgaaaa cctccctggg tccctggctg |
| 1441 | gggaccttcg aaccaaagca accatcgaac tcaaggccct taggttgctg aacttccaga |
| 1501 | ggcagctgcg ccaggaggtg gtggtgtgca tgcgaagaga cacagccctg gagacagccc |
| 1561 | tcaatgccaa ggcctacaag cgcagcaaac gtcagtcact acgggaggcc cgcatcactg |
| 1621 | agaagttgga gaagcagcag aagattgaac aggagcgcaa gcgccgccag aagcaccagg |
| 1681 | agtacctcaa cagcattctg cagcatgcca aggacttcag ggagtatcac agatcagtca |
| 1741 | caggcaaact ccagaaactc accaaggctg tggccaccta ccatgccaac actgagcggg |
| 1801 | agcagaagaa agaaaatgag cgcattgaga aggagcgaat gcggaggctt atggctgaag |
| 1861 | atgaggaggg ctaccgcaaa ctcattgacc agaagaagga caagcgcctg gcctaccttc |
| 1921 | tgcagcagac agatgagtat gtggccaacc tcacagagct ggtgcggcag cacaaagctg |
| 1981 | cccaggttgc caaggagaag aagaagaaaa agaaaaagaa gaaggcagaa aatgctgaag |
| 2041 | gacagacacc tgctattgga ccagatggtg agcctctgga tgagaccagc cagatgagtg |
| 2101 | acctccctgt gaaggtgatc cacgtggaga gtggcaagat cctcactggc acagatgccc |
| 2161 | caaaagccgg gcagctggaa gcctggcttg aaatgaaccc agggtatgaa gtagccccca |
| 2221 | ggtcagacag tgaagaaagt ggctctgaag aggaggagga ggaggaggaa gaggagcagc |
| 2281 | ctcagcccgc acagccccct acactgcctg tggaagaaaa gaagaagatt ccagacccag |
| 2341 | acagcgatga tgtctctgag gtggacgccc gacacattat tgagaacgcc aagcaagatg |
| 2401 | tggacgatga gtacggtgtg tcccaggccc ttgctcgtgg cctgcagtct tactatgctg |
| 2461 | tggcccatgc agtcacagag agagtagata agcagtccgc cctcatggtc aacggtgtcc |
| 2521 | tcaaacagta ccagatcaag ggtttggagt ggctggtgtc cctgtacaac aacaacctga |
| 2581 | atggcatcct ggctgatgag atggggctgg ggaagaccat ccagaccatc gcgctcatca |
| 2641 | catacctcat ggagcacaag cgcatcaacg ggcctttcct catcatcgtg cctctctcga |
| 2701 | cactgtcaaa ctgggcgtat gaatttgaca agtgggcccc ctctgtggtg aaggtttctt |
| 2761 | acaagggctc tccagctgca aggcgagctt ttgtcccaca gcttcgcagt gggaagttca |
| 2821 | acgtcttact gaccacctat gaatatatca tcaaagacaa gcatatccta gccaagatcc |
| 2881 | gctggaagta catgattgtg gatgaaggcc accgcatgaa aaaccaccac tgcaagttga |
| 2941 | cgcaggtcct taacacacac tacgtggccc ctcggcgcct gcttcttaca ggcacaccac |
| 3001 | tgcagaacaa gctaccggag ctctgggccc tgcttaactt cctgctcccc actatcttca |
| 3061 | agagctgcag caccttcgaa cagtggttca atgcaccctt tgccatgact ggagaaaagg |
| 3121 | tggacctgaa tgaagaggag actatcctca ttattcgtcg cctacacaaa gttctgcggc |
| 3181 | ccttcctgct gcggcggctc aagaaggaag ttgaagccca gctccctgag aaggtagagt |
| 3241 | atgtcatcaa atgcgacatg tcagccctgc agcgtgtgct gtaccgtcac atgcaggcca |
| 3301 | aaggtgtgct gctgactgac ggctccgaga aggacaagaa gggcaaaggt ggcaccaaga |
| 3361 | cactgatgaa cactattatg caactgcgta agatctgcaa ccacccctac atgttccagc |
| 3421 | acatcgagga gtccttttct gagcacttgg ggttcaccgg cggcatcgtg caaggattgg |
| 3481 | acctttaccg tgcctcaggg aaatttgaac ttcttgatag aattctaccc aaactccgtg |
| 3541 | caacgaacca taaagtgctc ctcttttgcc aaatgacctc cctcatgacc atcatggaag |
| 3601 | actactttgc ataccgtggc ttcaaatacc tcaggcttga tggaaccaca aaagcagaag |
| 3661 | accggggcat gctgttgaaa acctttaatg aacctggctc tgagtatttc attttcctgc |
| 3721 | tcagtacccg tgctgggggg ctgggcctga atctgcagtc agctgacact gtgatcatct |
| 3781 | ttgacagtga ctggaatccc caccaggacc tgcaagcaca ggatcgagcc catcgcattg |
| 3841 | gacagcagaa tgaggtgcgt gttcttcgcc tgtgcacggt caacagtgtg gaagagaaga |
| 3901 | tactggctgc tgccaaatac aaactcaatg tggatcagaa ggtgatccag gcaggcatgt |
| 3961 | tcgaccagaa gtcgtccagc catgagaggc gtgccttcct gcaggccatc ctggagcacg |
| 4021 | aggagcagga tgaggaggaa gatgaggtgc ctgatgatga gaccgtcaac cagatgattg |
| 4081 | cccggcacga agaagagttt gacctcttca tgcgcatgga cttggaccgc cggcgtgaag |
| 4141 | aagcccgcaa ccccaagcgg aagccacgcc tgatggaaga ggatgagctc ccatcctgga |
| 4201 | tcatcaagga tgatgccgag gtggagcggc tgacatgtga agaggaagag gagaagatgt |
| 4261 | tcggccgtgg ttctcgccac cgcaaggagg tagactacag cgactcactg acagagaagc |
| 4321 | agtggctcaa ggctatcgag gagggcacgc tggaggagat cgaagaggag gtccggcaga |
| 4381 | agaaatcttc acgtaagcgt aagcgagaca gcgaggccgg ctcctccacc ccgaccacca |
| 4441 | gcacccgcag ccgtgacaag gatgaggaga gcaagaagca gaagaaacgt gggcggccac |
| 4501 | ctgctgagaa gctgtcccca aacccaccta acctcaccaa gaagatgaag aagatcgtgg |
| 4561 | atgctgtgat caagtacaaa gacagcagtg gacgtcagct cagcgaggtg ttcatccagc |
| 4621 | tcccctctcg caaggagctt cctgagtact atgagctcat ccgaaagcct gtggacttca |
| 4681 | agaagatcaa ggaacgcatc cgaaaccaca agtaccgcag cctcaatgac ctggagaagg |
| 4741 | atgtgatgct gctgtgccag aacgctcaga cgttcaacct cgagggttcc ctgatctatg |
| 4801 | aggactccat cgtcctgcag tctgtcttca ccagcgtacg gcagaagatt gagaaggagg |
| 4861 | acgacagtga aggcgaggaa agcgaggagg aggaggaggg cgaggaggaa ggctccgagt |
| 4921 | ctgagtcccg ctccgtcaag gtgaagatca agctgggccg caaggagaag gcccaggacc |
| 4981 | gactcaaggg gggccgccgg cggccaagcc ggggatcccg ggccaagccg gttgtgagtg |
| 5041 | acgatgacag tgaggaggag caggaggagg accgctcagg aagtggcagt gaggaagact |
| 5101 | gaaccagaca ttcctgagtc ctgaccccga ggcgctcgtc ccagccaaga tggagtagcc |
| 5161 | cttagcagtg atgggtagca ccagatgtag tttcgaactt ggagaactgt acacatgcaa |
| 5221 | tcttccacat ttttaggcag agaagtatag gcctgtctgt cggccctggc ctggcctcga |
| 5281 | gtctctacca gcattaactg tctagagagg ggacctcctg ggagcaccat ccacctcccc |
| 5341 | aggccccagt cactgtagct cagtggatgc atgcgcgtgc cggccgctcc ttgtactgta |
| 5401 | tcttactgga cagggccagc tctccaggag gctcacaggc ccagcgggta tgtcagtgtc |
| 5461 | actggagtca gacagtaata aattaaagca atgacaagcc accactggct ccctggactc |
| 5521 | cttgctgtca gcagtggctc cggggccaca gagaagaaag aaagactttt aggaactggg |
| 5581 | tctaacttat gggcaaagta cttgccttgc caggtgtatg ggttttgcat tcccatcacc |
| 5641 | cacacaccct aaacaagcca agtcagtgag cttcaagtta gagcctccac ctcaatgtgt |
| 5701 | acgtggaaag caatcaaaga tgatgcctag catccacctc tggccctcat gtgcagatgt |
| 5761 | acacacactg aattacatac acgggacaca cacatccaca cggaggcagt ccatgacttg |
| 5821 | cactggggag atggtaccat aggcgaaagt gccacaggca cagggccagg ctaatttagt |
| 5881 | cctgcagtcc tgtgctctta agatgaaggc acaaagagga accccaggcg ctccaactag |
| 5941 | catgccaggc agtgacaaga ccctgcttca aatgaatcag agcccacatt cagtattgcc |
| 6001 | ctcttacccg atgcgatgcc catgccctca catatgaatg tgtatatata catacatacg |
| 6061 | taaaataatt cttttttaaa ttatagacat ttttgtgtga atgttttgcc tgaatgtgtg |
| 6121 | tgtgtgtgtg tgtgtgtgtg tgtgtgtgtg tgtgtgtgta tcaagtacat tcctagagcc |
| 6181 | tacagaggtc aagggagggc attggatctg gaactggagt cacatgaggc tgtgagcaac |
| 6241 | tgtgtgggtt cctgggcctt tgcaacagca gttagtactc ttcaccactg agccatttct |
| 6301 | ccaatctcaa aaagaagcat tcttttaaat gaagactgaa ataaataagt aggacttgcc |
| 6361 | ttgg |

SEQ ID NO: 209 Mouse SMARCA4 Amino Acid Sequence isoform 3
(NP_001167550.1)

| | |
|---|---|
| 1 | mstpdpplgg tprpgpspgp gpspgamlgp spgpspgsah smmgpspgpp saghpmptqg |
| 61 | pggypqdnmh qmhkpmesmh ekgmpddpry nqmkgmgmrs gahtgmappp spmdqhsqgy |
| 121 | psplggseha sspvpasgps sgpqmssgpg gapldgsdpq algqqnrgpt pfnqnqlhql |
| 181 | raqimaykml argqplpdhl qmavqgkrpm pgmqqqmptl pppsvsatgp gpgpgpgpgp |
| 241 | gpgpappnys rphgmggpnm pppgpsgvpp gmpgqppggp pkpwpegpma naaaptstpq |
| 301 | klippqptgr pspappavpp aaspvmppqt qspgqpaqpa plvplhqkqs ritpiqkprg |
| 361 | ldpveilqer eyrlqariah riqelenlpg slagdlrtka tielkalrll nfqrqlrqev |
| 421 | vvcmrrdtal etalnakayk rskrqslrea riteklekqq kieqerkrrq khqeylnsil |
| 481 | qhakdfreyh rsvtgklqkl tkavatyhan tereqkkene riekermrrl maedeegyrk |
| 541 | lidqkkdkrl ayllqqtdey vanltelvrq hkaaqvakek kkkkkkkkae naegqtpaig |
| 601 | pdgepldets qmsdlpvkvi hvesgkiltg tdapkagqle awlemnpgye vaprsdsees |
| 661 | gseeeeeeee eeqpqpaqpp tlpveekkki pdpdsddvse vdarhiiena kqdvddeygv |
| 721 | sqalarglqs yyavahavte rvdkqsalmv ngvlkqyqik glewlvslyn nnlngilade |
| 781 | mglgktiqti alitylmehk ringpfliiv plstlsnway efdkwapsvv kvsykgspaa |
| 841 | rrafvpqlrs gkfnvlltty eyiikdkhil akirwkymiv deghrmknhh ckltqvlnth |
| 901 | yvaprrlllt gtplqnklpe lwallnfllp tifkscstfe qwfnapfamt gekvdlneee |
| 961 | tiliirrlhk vlrpfllrrl kkeveaqlpe kveyvikcdm salqrvlyrh mqakgvlltd |
| 1021 | gsekdkkgkg gtktlmntim qlrkicnhpy mfqhieesfs ehlgftggiv qgldlyrasg |
| 1081 | kfelldrilp klratnhkvl lfcqmtslmt imedyfayrg fkylrldgtt kaedrgmllk |
| 1141 | tfnepgseyf ifllstragg lglnlqsadt viifdsdwnp hqdlqaqdra hrigqqnevr |
| 1201 | vlrlctvnsv eekilaaaky klnvdqkviq agmfdqksss herraflqai leheeqdeee |
| 1261 | devpddetvn qmiarheeef dlfmrmdldr rreearnpkr kprlmeedel pswiikddae |
| 1321 | verltceeee ekmfgrgsrh rkevdysdsl tekqwlkaie egtleeieee vrqkkssrkr |
| 1381 | krdseagsst pttstrsrdk deeskkqkkr grppaeklsp nppnltkkmk kivdavikyk |
| 1441 | dssgrqlsev fiqlpsrkel peyyelirkp vdfkkikeri rnhkyrsind lekdvmllcq |
| 1501 | naqtfnlegs liyedsivlq svftsvrqki ekeddsegee seeeeegeee gsesesrsvk |
| 1561 | vkiklgrkek aqdrlkggrr rpsrgsrakp vvsdddseee qeedrsgsgs eed |

SEQ ID NO: 210 Mouse SMARCA4 cDNA Sequence variant 4 (NM_001357764.1;
CDS: 261-5204)

| | |
|---|---|
| 1 | ggcaagtgga gcgggtagac agggaggcgg gggcgcgcgg cgggcgcgtg cggtgggggg |
| 61 | gggtggcctg gcgaagccca gcgggcgcgc gcgcgaggct ttcccactcg cttggcagcg |
| 121 | gcggagacgg cttctttgtt tcctgaggag aagcgagacg cccactctgt ccccgacccc |
| 181 | tcgtggaggg ttgggggcgg cgccaggaag gttacggcgc cgttacctcc aggagaccag |
| 241 | tgcctgtagc tccagtaaag atgtctactc cagacccacc cttgggtggg actcctcggc |
| 301 | ctggtccttc cccaggccct ggtccttcac ctggtgcaat gctgggtcct agccctggcc |
| 361 | cctcaccagg ttctgcccac agcatgatgg ggccaagccc aggacctcct tcagcaggac |
| 421 | atcccatgcc cacccagggg cctggagggt acccccagga caacatgcat cagatgcaca |
| 481 | agcctatgga gtccatgcac gagaagggca tgcctgatga cccacgatac aaccagatga |
| 541 | aagggatggg catgcggtca ggggcccaca caggcatggc acctccacct agtcccatgg |
| 601 | accagcattc tcaaggttac ccctcacccc tcggCggctc tgaacatgcc tccagtcctg |
| 661 | tcccagccag tggcccatct tcaggccccc agatgtcctc tgggccagga ggggccccac |
| 721 | tagatggttc tgatccccag gccttgggac agcaaaacag aggcccaacc ccatttaacc |
| 781 | agaaccagct gcatcaactc agagctcaga taatggccta caagatgttg gccaggggcc |
| 841 | agccattgcc cgaccacctg cagatggccg tgcaaggcaa gcggccgatg cctggaatgc |
| 901 | agcaacagat gccaacacta cctccaccct cagtgtccgc cacaggaccc ggacctggac |
| 961 | ccggccctgg ccctggccct ggcccaggac cagcccctcc aaattacagt agaccccatg |
| 1021 | gtatgggagg gcccaacatg cctcccccag gaccctcagg tgtgcccccc gggatgcctg |
| 1081 | gtcagccgcc tggagggcct cccaagccat ggcctgaagg acccatggcc aatgctgctg |
| 1141 | cccccacaag caccccacag aagctgattc ctccgcaacc aacaggccgt ccttcacctg |
| 1201 | cacctcctgc tgtcccgcct gctgcctcac ctgtaatgcc accacaaaca cagtccccag |
| 1261 | ggcagccagc ccagcctgct ccattggtgc cactgcacca gaagcagagc cgaatcaccc |
| 1321 | ccatccagaa gccccgaggc cttgaccctg tggagatcct acaagagcgg gagtacaggc |
| 1381 | ttcaggctcg aatcgcacac agaattcagg aacttgaaaa cctccctggg tccctggctg |
| 1441 | gggaccttcg aaccaaagca accatcgaac tcaaggccct taggttgctg aacttccaga |
| 1501 | ggcagctgcg ccaggaggtg gtggtgtgca tgcgaagaga cacagccctg gagacagccc |
| 1561 | tcaatgccaa ggcctacaag cgcagcaaac gtcagtcact acgggaggcc cgcatcactg |
| 1621 | agaagttgga gaagcagcag aagattgaac aggagcgcaa gcgccgccag aagcaccagg |
| 1681 | agtacctcaa cagcattctg cagcatgcca aggacttcag ggagtatcac agatcagtca |
| 1741 | caggcaaact ccagaaactc accaaggctg tggccaccta ccatgccaac actgagcggg |
| 1801 | agcagaagaa agaaaatgag cgcattgaga aggagcgaat gcggaggctt atggctgaag |
| 1861 | atgaggaggg ctaccgcaaa ctcattgacc agaagaagga caagcgcctg gcctaccttc |
| 1921 | tgcagcagac agatgagtat gtggccaacc tcacagagct ggtgcggcag cacaaagctg |
| 1981 | cccaggttgc caaggagaag aagaagaaaa agaaaaagaa gaaggcagaa aatgctgaag |
| 2041 | gacagacacc tgctattgga ccagatggtg agcctctgga tgagaccagc cagatgagtg |
| 2101 | acctccctgt gaaggtgatc cacgtggaga gtggcaagat cctcactggc acagatgccc |
| 2161 | caaaagccgg gcagctggaa gcctggcttg aaatgaaccc agggtatgaa gtagccccca |
| 2221 | ggtcagacag tgaagaaagt ggctctgaag aggaggagga ggaggaggaa gaggagcagc |
| 2281 | ctcagcccgc acagccccct acactgcctg tggaagaaaa gaagaagatt ccagacccag |
| 2341 | acagcgatga tgtctctgag gtggacgccc gacacattat tgagaacgcc aagcaagatg |
| 2401 | tggacgatga gtacggtgtg tcccaggccc ttgctcgtgg cctgcagtct tactatgctg |
| 2461 | tggcccatgc agtcacagag agagtagata agcagtccgc cctcatggtc aacggtgtcc |
| 2521 | tcaaacagta ccagatcaag ggtttggagt ggctggtgtc cctgtacaac aacaacctga |
| 2581 | atggcatcct ggctgatgag atggggctgg ggaagaccat ccagaccatc gcgctcatca |
| 2641 | catacctcat ggagcacaag cgcatcaacg ggcctttcct catcatcgtg cctctctcga |
| 2701 | cactgtcaaa ctgggcgtat gaatttgaca agtgggcccc ctctgtggtg aaggtttctt |
| 2761 | acaagggctc tccagctgca aggcgagctt ttgtcccaca gcttcgcagt gggaagttca |
| 2821 | acgtcttact gaccacctat gaatatatca tcaaagacaa gcatatccta gccaagatcc |
| 2881 | gctggaagta catgattgtg gatgaaggcc accgcatgaa aaaccaccac tgcaagttga |
| 2941 | cgcaggtcct taacacacac tacgtggccc ctcggcgcct gcttcttaca ggcacaccac |
| 3001 | tgcagaacaa gctaccggag ctctgggccc tgcttaactt cctgctcccc actatcttca |
| 3061 | agagctgcag caccttcgaa cagtggttca atgcaccctt tgccatgact ggagaaaagg |
| 3121 | tggacctgaa tgaagaggag actatcctca ttattcgtcg cctacacaaa gttctgcggc |
| 3181 | ccttcctgct gcggcggctc aagaaggaag ttgaagccca gctccctgag aaggtagagt |
| 3241 | atgtcatcaa atgcgacatg tcagccctgc agcgtgtgct gtaccgtcac atgcaggcca |
| 3301 | aaggtgtgct gctgactgac ggctccgaga aggacaagaa gggcaaaggt ggcaccaaga |
| 3361 | cactgatgaa cactattatg caactgcgta agatctgcaa ccacccctac atgttccagc |
| 3421 | acatcgagga gtccttttct gagcacttgg ggttcaccgg cggcatcgtg caaggattgg |
| 3481 | acctttaccg tgcctcaggg aaatttgaac ttcttgatag aattctaccc aaactccgtg |
| 3541 | caacgaacca taaagtgctc ctcttttgcc aaatgacctc cctcatgacc atcatggaag |
| 3601 | actactttgc ataccgtggc ttcaaatacc tcaggcttga tggaaccaca aaagcagaag |
| 3661 | accggggcat gctgttgaaa acctttaatg aacctggctc tgagtatttc attttcctgc |
| 3721 | tcagtacccg tgctgggggg ctgggcctga atctgcagtc agctgacact gtgatcatct |
| 3781 | ttgacagtga ctggaatccc caccaggacc tgcaagcaca ggatcgagcc catcgcattg |
| 3841 | gacagcagaa tgaggtgcgt gttcttcgcc tgtgcacggt caacagtgtg gaagagaaga |
| 3901 | tactggctgc tgccaaatac aaactcaatg tggatcagaa ggtgatccag gcaggcatgt |
| 3961 | tcgaccagaa gtcgtccagc catgagaggc gtgccttcct gcaggccatc ctggagcacg |
| 4021 | aggagcagga tgagagcaga cactgcagca cgggcagcgg cagtgccagc ttcgcccaca |
| 4081 | ctgcccctcc gccagcgggc gtcaaccccg acttggagga gccacctcta aaggaggaag |
| 4141 | atgaggtgcc tgatgatgag accgtcaacc agatgattgc ccggcacgaa gaagagtttg |
| 4201 | acctcttcat gcgcatggac ttggaccgcc ggcgtgaaga agcccgcaac cccaagcgga |
| 4261 | agccacgcct gatggaagag gatgagctcc catcctggat catcaaggat gatgccgagg |
| 4321 | tggagcggct gacatgtgaa gaggaagagg agaagatgtt cggccgtggt tctcgccacc |
| 4381 | gcaaggaggt agactacagc gactcactga cagagaagca gtggctcaag gctatcgagg |
| 4441 | agggcacgct ggaggagatc gaagaggagg tccggcagaa gaaatcttca cgtaagcgta |
| 4501 | agcgagacag cgaggccggc tcctccaccc cgaccaccag cacccgcagc cgtgacaagg |
| 4561 | atgaggagag caagaagcag aagaaacgtg ggcggccacc tgctgagaag ctgtccccaa |
| 4621 | acccacctaa cctcaccaag aagatgaaga agatcgtgga tgctgtgatc aagtacaaag |
| 4681 | acagcagcag tggacgtcag ctcagcgagg tgttcatcca gctcccctct cgcaaggagc |
| 4741 | ttcctgagta ctatgagctc atccgaaagc ctgtggactt caagaagatc aaggaacgca |
| 4801 | tccgaaacca caagtaccgc agcctcaatg acctggagaa ggatgtgatg ctgctgtgcc |
| 4861 | agaacgctca gacgttcaac ctcgagggtt ccctgatcta tgaggactcc atcgtcctgc |
| 4921 | agtctgtctt caccagcgta cggcagaaga ttgagaagga ggacgacagt gaaggcgagg |
| 4981 | aaagcgagga ggaggaggag ggcgaggagg aaggctccga gtctgagtcc cgctccgtca |
| 5041 | aggtgaagat caagctgggc cgcaaggaga aggcccagga ccgactcaag gggggccgcc |
| 5101 | ggcggccaag ccggggatcc cgggccaagc cggttgtgag tgacgatgac agtgaggagg |
| 5161 | agcaggagga ggaccgctca ggaagtggca gtgaggaaga ctgaaccaga cattcctgag |
| 5221 | tcctgacccc gaggcgctcg tcccagccaa gatggagtag cccttagcag tgatgggtag |
| 5281 | caccagatgt agtttcgaac ttggagaact gtacacatgc aatcttccac atttttaggc |
| 5341 | agagaagtat aggcctgtct gtcggccctg gcctggcctc gagtctctac cagcattaac |
| 5401 | tgtctagaga ggggacctcc tgggagcacc atccacctcc ccaggcccca gtcactgtag |
| 5461 | ctcagtggat gcatgcgcgt gccggccgct ccttgtactg tatcttactg gacagggcca |
| 5521 | gctctccagg aggctcacag gcccagcggg tatgtcagtg tcactggagt cagacagtaa |
| 5581 | taaattaaag caatgacaag ccaccactgg ctccctggac tccttgctgt cagcagtggc |
| 5641 | tccggggcca cagagaagaa agaaagactt ttaggaactg ggtctaactt atgggcaaag |
| 5701 | tacttgcctt gccaggtgta tgggttttgc attcccatca cccacacacc ctaaacaagc |
| 5761 | caagtcagtg agcttcaagt tagagcctcc acctcaatgt gtacgtggaa agcaatcaaa |
| 5821 | gatgatgcct agcatccacc tctggccctc atgtgcagat gtacacacac tgaattacat |
| 5881 | acacgggaca cacacatcca cacggaggca gtccatgact tgcactgggg agatggtacc |
| 5941 | ataggcgaaa gtgccacagg cacagggcca ggctaattta gtcctgcagt cctgtgctct |
| 6001 | taagatgaag gcacaaagag gaaccccagg cgctccaact agcatgccag gcagtgacaa |
| 6061 | gaccctgctt caaatgaatc agagcccaca ttcagtattg ccctcttacc cgatgcgatg |
| 6121 | cccatgccct cacatatgaa tgtgtatata tacatacata cgtaaaataa ttctttttta |
| 6181 | aattatagac atttttgtgt gaatgttttg cctgaatgtg tgtgtgtgtg tgtgtgtgtg |
| 6241 | tgtgtgtgtg tgtgtgtgtg tatcaagtac attcctagag cctacagagg tcaagggagg |
| 6301 | gcattggatc tggaactgga gtcacatgag gctgtgagca actgtgtggg ttcctgggcc |
| 6361 | tttgcaacag cagttagtac tcttcaccac tgagccattt ctccaatctc aaaaagaagc |
| 6421 | attcttttaa atgaagactg aaataaataa gtaggacttg ccttgg |

SEQ ID NO: 211 Mouse SMARCA4 Amino Acid Sequence isoform 4
(NP_001344693.1)

| | |
|---|---|
| 1 | mstpdpplgg tprpgpspgp gpspgamlgp spgpspgsah smmgpspgpp saghpmptqg |
| 61 | pggypqdnmh qmhkpmesmh ekgmpddpry nqmkgmgmrs gahtgmappp spmdqhsqgy |
| 121 | psplggseha sspvpasgps sgpqmssgpg gapldgsdpq algqqnrgpt pfnqnqlhql |
| 181 | raqimaykml argqplpdhl qmavqgkrpm pgmqqqmptl pppsvsatgp gpgpgpgpgp |
| 241 | gpgpappnys rphgmggpnm pppgpsgvpp gmpgqppggp pkpwpegpma naaaptstpq |
| 301 | klippqptgr pspappavpp aaspvmppqt qspgqpaqpa plvplhqkqs ritpiqkprg |
| 361 | ldpveilqer eyrlqariah riqelenlpg slagdlrtka tielkalrll nfqrqlrqev |
| 421 | vvcmrrdtal etalnakayk rskrqslrea riteklekqq kieqerkrrq khqeylnsil |
| 481 | qhakdfreyh rsvtgklqkl tkavatyhan tereqkkene riekermrrl maedeegyrk |
| 541 | lidqkkdkrl ayllqqtdey vanltelvrq hkaaqvakek kkkkkkkkae naegqtpaig |
| 601 | pdgepldets qmsdlpvkvi hvesgkiltg tdapkagqle awlemnpgye vaprsdsees |
| 661 | gseeeeeeee eeqpqpaqpp tlpveekkki pdpdsddvse vdarhiiena kqdvddeygv |
| 721 | sqalarglqs yyavahavte rvdkqsalmv ngvlkqyqik glewlvslyn nnlngilade |
| 781 | mglgktiqti alitylmehk ringpfliiv plstlsnway efdkwapsvv kvsykgspaa |
| 841 | rrafvpqlrs gkfnvlltty eyiikdkhil akirwkymiv deghrmknhh ckltqvlnth |
| 901 | yvaprrlllt gtplqnklpe lwallnfllp tifkscstfe qwfnapfamt gekvdlneee |
| 961 | tiliirrlhk vlrpfllrrl kkeveaqlpe kveyvikcdm salqrvlyrh mqakgvlltd |
| 1021 | gsekdkkgkg gtktlmntim qlrkicnhpy mfqhieesfs ehlgftggiv qgldlyrasg |
| 1081 | kfelldrilp klratnhkvl lfcqmtslmt imedyfayrg fkylrldgtt kaedrgmllk |
| 1141 | tfnepgseyf ifllstragg lglnlqsadt viifdsdwnp hqdlqaqdra hrigqqnevr |
| 1201 | vlrlctvnsv eekilaaaky klnvdqkviq agmfdqksss herraflqai leheeqdesr |
| 1261 | hcstgsgsas fahtapppag vnpdleeppl keedevpdde tvnqmiarhe eefdlfmrmd |
| 1321 | ldrrreearn pkrkprlmee delpswiikd daeverltce eeeekmfgrg srhrkevdys |
| 1381 | dsltekqwlk aieegtleei eeevrqkkss rkrkrdseag sstpttstrs rdkdeeskkq |
| 1441 | kkrgrppaek lspnppnltk kmkkivdavi kykdsssgrq lsevfiqlps rkelpeyyel |
| 1501 | irkpvdfkki kerirnhkyr slndlekdvm llcqnaqtfn legsliyeds ivlqsvftsv |
| 1561 | rqkiekedds egeeseeeee geeegseses rsvkvkiklg rkekagdrlk ggrrrpsrgs |
| 1621 | rakpvvsddd seeeqeedrs gsgseed |

SEQ ID NO: 212 Mouse SMARCA4 cDNA Sequence variant 1 (NM_001174078.1;
261-5114)

| | |
|---|---|
| 1 | ggcaagtgga gcgggtagac agggaggcgg gggcgcgcgg cgggcgcgtg cggtgggggg |
| 61 | gggtggcctg gcgaagccca gcgggcgcgc gcgcgaggct ttcccactcg cttggcagcg |
| 121 | gcggagacgg cttctttgtt tcctgaggag aagcgagacg cccactctgt ccccgacccc |
| 181 | tcgtggaggg ttgggggcgg cgccaggaag gttacggcgc cgttacctcc aggagaccag |
| 241 | tgcctgtagc tccagtaaag atgtctactc cagacccacc cttgggtggg actcctcggc |
| 301 | ctggtccttc cccaggccct ggtccttcac ctggtgcaat gctgggtcct agccctggcc |
| 361 | cctcaccagg ttctgcccac agcatgatgg ggccaagccc aggacctcct tcagcaggac |
| 421 | atcccatgcc cacccagggg cctggagggt acccccagga caacatgcat cagatgcaca |
| 481 | agcctatgga gtccatgcac gagaagggca tgcctgatga cccacgatac aaccagatga |
| 541 | aagggatggg catgcggtca ggggcccaca caggcatggc acctccacct agtcccatgg |
| 601 | accagcattc tcaaggttac ccctcacccc tcggcggctc tgaacatgcc tccagtcctg |
| 661 | tcccagccag tggcccatct tcaggccccc agatgtcctc tgggccagga ggggccccac |
| 721 | tagatggttc tgatccccag gccttgggac agcaaaacag aggcccaacc ccatttaacc |
| 781 | agaaccagct gcatcaactc agagctcaga taatggccta caagatgttg gccaggggcc |
| 841 | agccattgcc cgaccacctg cagatggccg tgcaaggcaa gcggccgatg cctggaatgc |
| 901 | agcaacagat gccaacacta cctccaccct cagtgtccgc cacaggaccc ggacctggac |
| 961 | ccggccctgg ccctggccct ggcccaggac cagcccctcc aaattacagt agaccccatg |
| 1021 | gtatgggagg gcccaacatg cctcccccag gaccctcagg tgtgcccccc gggatgcctg |
| 1081 | gtcagccgcc tggagggcct cccaagccat ggcctgaagg acccatggcc aatgctgctg |
| 1141 | cccccacaag caccccacag aagctgattc ctccgcaacc aacaggccgt ccttcacctg |
| 1201 | cacctcctgc tgtcccgcct gctgcctcac ctgtaatgcc accacaaaca cagtccccag |
| 1261 | ggcagccagc ccagcctgct ccattggtgc cactgcacca gaagcagagc cgaatcaccc |
| 1321 | ccatccagaa gccccgaggc cttgaccctg tggagatcct acaagagcgg gagtacaggc |
| 1381 | ttcaggctcg aatcgcacac agaattcagg aacttgaaaa cctccctggg tccctggctg |
| 1441 | gggaccttcg aaccaaagca accatcgaac tcaaggccct taggttgctg aacttccaga |
| 1501 | ggcagctgcg ccaggaggtg gtggtgtgca tgcgaagaga cacagccctg gagacagccc |
| 1561 | tcaatgccaa ggcctacaag cgcagcaaac gtcagtcact acgggaggcc cgcatcactg |
| 1621 | agaagttgga gaagcagcag aagattgaac aggagcgcaa gcgccgccag aagcaccagg |
| 1681 | agtacctcaa cagcattctg cagcatgcca aggacttcag ggagtatcac agatcagtca |
| 1741 | caggcaaact ccagaaactc accaaggctg tggccaccta ccatgccaac actgagcggg |
| 1801 | agcagaagaa agaaaatgag cgcattgaga aggagcgaat gcggaggctt atggctgaag |
| 1861 | atgaggaggg ctaccgcaaa ctcattgacc agaagaagga caagcgcctg gcctaccttc |
| 1921 | tgcagcagac agatgagtat gtggccaacc tcacagagct ggtgcggcag cacaaagctg |
| 1981 | cccaggttgc caaggagaag aagaagaaaa agaaaaagaa gaaggcagaa aatgctgaag |
| 2041 | gacagacacc tgctattgga ccagatggtg agcctctgga tgagaccagc cagatgagtg |
| 2101 | acctccctgt gaaggtgatc cacgtggaga gtggcaagat cctcactggc acagatgccc |
| 2161 | caaaagccgg gcagctggaa gcctggcttg aaatgaaccc agggtatgaa gtagccccca |
| 2221 | ggtcagacag tgaagaaagt ggctctgaag aggaggagga ggaggaggaa gaggagcagc |
| 2281 | ctcagcccgc acagccccct acactgcctg tggaagaaaa gaagaagatt ccagacccag |
| 2341 | acagcgatga tgtctctgag gtggacgccc gacacattat tgagaacgcc aagcaagatg |
| 2401 | tggacgatga gtacggtgtg tcccaggccc ttgctcgtgg cctgcagtct tactatgctg |
| 2461 | tggcccatgc agtcacagag agagtagata agcagtccgc cctcatggtc aacggtgtcc |
| 2521 | tcaaacagta ccagatcaag ggtttggagt ggctggtgtc cctgtacaac aacaacctga |
| 2581 | atggcatcct ggctgatgag atggggctgg ggaagaccat ccagaccatc gcgctcatca |
| 2641 | catacctcat ggagcacaag cgcatcaacg ggcctttcct catcatcgtg cctctctcga |
| 2701 | cactgtcaaa ctgggcgtat gaatttgaca agtgggcccc ctctgtggtg aaggtttctt |
| 2761 | acaagggctc tccagctgca aggcgagctt ttgtcccaca gcttcgcagt gggaagttca |
| 2821 | acgtcttact gaccacctat gaatatatca tcaaagacaa gcatatccta gccaagatcc |
| 2881 | gctggaagta catgattgtg gatgaaggcc accgcatgaa aaaccaccac tgcaagttga |
| 2941 | cgcaggtcct taacacacac tacgtggccc ctcggcgcct gcttcttaca ggcacaccac |
| 3001 | tgcagaacaa gctaccggag ctctgggccc tgcttaactt cctgctcccc actatcttca |
| 3061 | agagctgcag caccttcgaa cagtggttca atgcaccctt tgccatgact ggagaaaagg |
| 3121 | tggacctgaa tgaagaggag actatcctca ttattcgtcg cctacacaaa gttctgcggc |
| 3181 | ccttcctgct gcggcggctc aagaaggaag ttgaagccca gctccctgag aaggtagagt |
| 3241 | atgtcatcaa atgcgacatg tcagccctgc agcgtgtgct gtaccgtcac atgcaggcca |
| 3301 | aaggtgtgct gctgactgac ggctccgaga aggacaagaa gggcaaaggt ggcaccaaga |
| 3361 | cactgatgaa cactattatg caactgcgta agatctgcaa ccacccctac atgttccagc |
| 3421 | acatcgagga gtccttttct gagcacttgg ggttcaccgg cggcatcgtg caaggattgg |
| 3481 | acctttaccg tgcctcaggg aaatttgaac ttcttgatag aattctaccc aaactccgtg |
| 3541 | caacgaacca taaagtgctc ctcttttgcc aaatgacctc cctcatgacc atcatggaag |
| 3601 | actactttgc ataccgtggc ttcaaatacc tcaggcttga tggaaccaca aaagcagaag |
| 3661 | accggggcat gctgttgaaa acctttaatg aacctggctc tgagtatttc attttcctgc |
| 3721 | tcagtacccg tgctgggggg ctgggcctga atctgcagtc agctgacact gtgatcatct |
| 3781 | ttgacagtga ctggaatccc caccaggacc tgcaagcaca ggatcgagcc catcgcattg |
| 3841 | gacagcagaa tgaggtgcgt gttcttcgcc tgtgcacggt caacagtgtg gaagagaaga |
| 3901 | tactggctgc tgccaaatac aaactcaatg tggatcagaa ggtgatccag gcaggcatgt |
| 3961 | tcgaccagaa gtcgtccagc catgagaggc gtgccttcct gcaggccatc ctggagcacg |
| 4021 | aggagcagga tgaggaggaa gatgaggtgc ctgatgatga gaccgtcaac cagatgattg |
| 4081 | cccggcacga agaagagttt gacctcttca tgcgcatgga cttggaccgc cggcgtgaag |
| 4141 | aagcccgcaa ccccaagcgg aagccacgcc tgatggaaga ggatgagctc ccatcctgga |
| 4201 | tcatcaagga tgatgccgag gtggagcggc tgacatgtga agaggaagag gagaagatgt |
| 4261 | tcggccgtgg ttctcgccac cgcaaggagg tagactacag cgactcactg acagagaagc |
| 4321 | agtggctcaa gaccctgaag gctatcgagg agggcacgct ggaggagatc gaagaggagg |
| 4381 | tccggcagaa gaaatcttca cgtaagcgta agcgagacag cgaggccggc tcctccaccc |
| 4441 | cgaccaccag cacccgcagc cgtgacaagg atgaggagag caagaagcag aagaaacgtg |
| 4501 | ggcggccacc tgctgagaag ctgtccccaa acccacctaa cctcaccaag aagatgaaga |
| 4561 | agatcgtgga tgctgtgatc aagtacaaag acagcagcag tggacgtcag ctcagcgagg |
| 4621 | tgttcatcca gctcccctct cgcaaggagc ttcctgagta ctatgagctc atccgaaagc |
| 4681 | ctgtggactt caagaagatc aaggaacgca tccgaaacca caagtaccgc agcctcaatg |
| 4741 | acctggagaa ggatgtgatg ctgctgtgcc agaacgctca gacgttcaac ctcgagggtt |
| 4801 | ccctgatcta tgaggactcc atcgtcctgc agtctgtctt caccagcgta cggcagaaga |
| 4861 | ttgagaagga ggacgacagt gaaggcgagg aaagcgagga ggaggaggag ggcgaggagg |
| 4921 | aaggctccga gtctgagtcc cgctccgtca aggtgaagat caagctgggc cgcaaggaga |
| 4981 | aggcccagga ccgactcaag gggggccgcc ggcggccaag ccggggatcc cgggccaagc |
| 5041 | cggttgtgag tgacgatgac agtgaggagg agcaggagga ggaccgctca ggaagtggca |
| 5101 | gtgaggaaga ctgaaccaga cattcctgag tcctgacccc gaggcgctcg tcccagccaa |
| 5161 | gatggagtag cccttagcag tgatgggtag caccagatgt agtttcgaac ttggagaact |
| 5221 | gtacacatgc aatcttccac atttttaggc agagaagtat aggcctgtct gtcggccctg |
| 5281 | gcctggcctc gagtctctac cagcattaac tgtctagaga ggggacctcc tgggagcacc |
| 5341 | atccacctcc ccaggcccca gtcactgtag ctcagtggat gcatgcgcgt gccggccgct |
| 5401 | ccttgtactg tatcttactg gacagggcca gctctccagg aggctcacag gcccagcggg |
| 5461 | tatgtcagtg tcactggagt cagacagtaa taaattaaag caatgacaag ccaccactgg |
| 5521 | ctccctggac tccttgctgt cagcagtggc tccggggcca cagagaagaa agaaagactt |
| 5581 | ttaggaactg ggtctaactt atgggcaaag tacttgcctt gccaggtgta tgggttttgc |
| 5641 | attcccatca cccacacacc ctaaacaagc caagtcagtg agcttcaagt tagagcctcc |
| 5701 | acctcaatgt gtacgtggaa agcaatcaaa gatgatgcct agcatccacc tctggccctc |
| 5761 | atgtgcagat gtacacacac tgaattacat acacgggaca cacacatcca cacggaggca |
| 5821 | gtccatgact tgcactgggg agatggtacc ataggcgaaa gtgccacagg cacagggcca |
| 5881 | ggctaattta gtcctgcagt cctgtgctct taagatgaag gcacaaagag gaaccccagg |
| 5941 | cgctccaact agcatgccag gcagtgacaa gaccctgctt caaatgaatc agagcccaca |
| 6001 | ttcagtattg ccctcttacc cgatgcgatg cccatgccct cacatatgaa tgtgtatata |
| 6061 | tacatacata cgtaaaataa ttctttttta aattatagac atttttgtgt gaatgttttg |
| 6121 | cctgaatgtg tgtgtgtgtg tgtgtgtgtg tgtgtgtgtg tgtgtgtgtg tatcaagtac |
| 6181 | attcctagag cctacagagg tcaagggagg gcattggatc tggaactgga gtcacatgag |
| 6241 | gctgtgagca actgtgtggg ttcctgggcc tttgcaacag cagttagtac tcttcaccac |
| 6301 | tgagccattt ctccaatctc aaaaagaagc attcttttaa atgaagactg aaataaataa |
| 6361 | gtaggacttg ccttgg |

SEQ ID NO: 213 HumanHistone H3.1 Amino Acid Sequence (NP_003520.1)

| | |
|---|---|
| 1 | martkqtark stggkaprkq latkaarksa patggvkkph ryrpgtvalr eirryqkste |
| 61 | llirklpfqr lvreiaqdfk tdlrfqssav malqeaceay lvglfedtnl caihakrvti |
| 121 | mpkdiqlarr irgera |

SEQ ID NO: 214 Mouse Histone H3.1 Amino Acid Sequence (NP_038578.2):

| | |
|---|---|
| 1 | martkqtark stggkaprkq latkaarksa patggvkkph ryrpgtvalr eirryqkste |
| 61 | llirklpfqr lvreiaqdfk tdlrfqssav malqeaceay lvglfedtnl caihakrvti |
| 121 | mpkdiqlarr irgera |

SEQ ID NO: 215 Human Histone H3.2 Amino Acid Sequence (NP_001005464.1):

| | |
|---|---|
| 1 | martkqtark stggkaprkq latkaarksa patggvkkph ryrpgtvalr eirryqkste |
| 61 | llirklpfqr lvreiaqdfk tdlrfqssav malqeaseay lvglfedtnl caihakrvti |
| 121 | mpkdiqlarr irgera |

SEQ ID NO: 216 Mouse Histone H3.2 Amino Acid Sequence (NP_835587.1):

| | |
|---|---|
| 1 | martkqtark stggkaprkq latkaarksa patggvkkph ryrpgtvalr eirryqkste |
| 61 | llirklpfqr lvreiaqdfk tdlrfqssav malqeaseay lvglfedtnl caihakrvti |
| 121 | mpkdiqlarr irgera |

SEQ ID NO: 217 Human Histone H3.3 Amino Acid Sequence (NP_002098.1):

| | |
|---|---|
| 1 | martkqtark stggkaprkq latkaarksa pstggvkkph ryrpgtvalr eirryqkste |
| 61 | llirklpfqr lvreiaqdfk tdlrfqsaai galqeaseay lvglfedtnl caihakrvti |
| 121 | mpkdiqlarr irgera |

SEQ ID NO: 218 Mouse Histone H3.3 Amino Acid Sequence (NP_032237.1);

| | |
|---|---|
| 1 | martkqtark stggkaprkq latkaarksa pstggvkkph ryrpgtvalr eirryqkste |
| 61 | llirklpfqr lvreiaqdfk tdlrfqsaai galqeaseay lvglfedtnl caihakrvti |
| 121 | mpkdiqlarr irgera |

[0244] H2A protein and cDNA sequences described herein, including human, mouse, rat, and Xenopus H2A sequences
[0245] H2B protein and cDNA sequences described herein, including human, mouse, rat, and Xenopus H2B sequences

TABLE 2
SS18-SSX fusion protein sequences
MSVAFAAPRQRGKGEITPAAIQKMLDDNNHLIQCIMDSQNKGKTSECSQYQQMLHTNLVYLATIADSNQN
MQSLLPAPPTQNMPMGPGGMNQSGPPPPPPSHNMPSDGMVGGGPPAPHMQNQMNGQMPGPNHMPMQGPGP
NQLNMTNSSMNMPSSSHGSMGGYNHSVPSSQSMPVQNQMTMSQGQPMGNYGPRPNMSMQPNQGPMMHQQP
PSQQYNMPQGGGQHYQGQQPPMGMMGQVNQGNHMMGQPQIPPYRPPQQGPPQQYSGQEDYYGDQYSHGGQ
GPPEGMNQQYYPDGNSQYGQQQDAYQGPPPQQGYPPQQQQYPGQQGYPGQQQGYGPSQGGPGPQYPNYPQ
GQGQQYGGYRPTQPGPPQPPQQRPYGYDQIMPKKPAEDENDSKGVSEASGPQNDGKQLH
PPGKANISEKINKRSGPKPGKHAWTHRLRERKQLVIYEETSDPEEDDE (SEQ ID NO: 225)
SS18-SSX fusion protein cDNA sequences
SS18 AA 1-379 aa + SSX1 (C-terminal 78 AA)
ATGTCTGTGGCTTTCGCGGCCCCGAGGCAGCGAGGCAAGGGGGAGATCACTCCCGCTGCGATTCAGAAGA
TGTTGGATGACAATAACCATCTTATTCAGTGTATAATGGACTCTCAGAATAAAGGAAAGACCTCAGAGTG
TTCTCAGTATCAGCAGATGTTGCACACAAACTTGGTATACCTTGCTACAATAGCAGATTCTAATCAAAAT
ATGCAGTCTCTTTTACCAGCACCACCCACACAGAATATGCCTATGGGTCCTGGAGGGATGAATCAGAGCG
GCCCTCCCCCACCTCCACGCTCTCACAACATGCCTTCAGATGGAATGGTAGGTGGGGGTCCTCCTGCACC
GCACATGCAGAACCAGATGAACGGCCAGATGCCTGGGCCTAACCATATGCCTATGCAGGGACCTGGACCC
AATCAACTCAATATGACAAACAGTTCCATGAATATGCCTTCAAGTAGCCATGGATCCATGGGAGGTTACA
ACCATTCTGTGCCATCATCACAGAGCATGCCAGTACAGAATCAGATGACAATGAGTCAGGGACAACCAAT
GGGAAACTATGGTCCCAGACCAAATATGAGTATGCAGCCAAACCAAGGTCCAATGATGCATCAGCAGCCT
CCTTCTCAGCAATACAATATGCCACAGGGAGGCGGACAGCATTACCAAGGACAGCAGCCACCTATGGGAA
TGATGGGTCAAGTTAACCAAGGCAATCATATGATGGGTCAGAGACAGATTCCTCCCTATAGACCTCCTCA
ACAGGGCCCACCACAGCAGTACTCAGGCCAGGAAGACTATTACGGGGACCAATACAGTCATGGTGGACAA
GGTCCTCCAGAAGGCATGAACCAGCAATATTACCCTGATGGAAATTCACAGTATGGCCAACAGCAAGATG
CATACCAGGGACCACCTCCACAACAGGGATATCCACCCCAGCAGCAGCAGTACCCAGGGCAGCAAGGTTA
CCCAGGACAGCAGCAGGGCTACGGTCCTTCACAGGGTGGTCCAGGTCCTCAGTATCCTAACTACCCACAG
GGACAAGGTCAGCAGTATGGAGGATATAGACCAACACAGCCTGGACCACCACAGCCACCCCAGCAGAGGC
CTTATGGATATGACCAGATCATGCCCAAGAAGCCAGCAGAGGACGAAAATGATTCGAAGGGAGTGTCAGAAGC
ATCTGGCCCACAAAACGATGGGAAACAACTGCACCCCCCAGGAAAAGCAAATATTTCTGAGAAGATTAATAAG
AGATCTGGACCCAAAAGGGGGAAACATGCCTGGACCCACAGACTGCGTGAGAGAAAGCAGCTGGTGATTTATG
AAGAGATCAGTGACCCTGAGGAAGATGACGAGTAA (SEQ ID NO: 226)
* Included in Tables 1 and 2 are RNA nucleic acid molecules (e.g., thymines replaced with uredines), nucleic acid molecules encoding orthologs of the encoded proteins, as well as DNA or RNA nucleic acid sequences comprising a nucleic acid sequence having at least 80%, 81%, 82%, 83%, 84%, 85%, 86%, 87%, 88%, 89%, 90%, 91%, 92%, 93%, 94%, 95%, 96%, 97%, 98%, 99%, 99.5%, or more identity across their full length with the nucleic acid sequence of any sequence listed in Table 1, or a portion thereof. Such nucleic acid molecules can have a function of the full-length nucleic acid as described further herein.
* Included in Tables 1 and 2 are orthologs of the proteins, as well as polypeptide molecules comprising an amino acid sequence having at least 80%, 81%, 82%, 83%, 84%, 85%, 86%, 87%, 88%, 89%, 90%, 91%, 92%, 93%, 94%, 95%, 96%, 97%, 98%, 99%, 99.5%, or more identity across their full length with an amino acid sequence of any sequence listed in Table 1, or a portion thereof. Such polypeptides can have a function of the full-length polypeptide as described further herein.

### II. Subjects

[0246] In one embodiment, the subject for whom an agent that inhibits binding of a SS18-SSX fusion protein to an H2A K119Ub-marked nucleosome is administered, or whose predicted likelihood of efficacy of the agent for treating a cancer is determined, is a mammal (e.g., rat, primate, non-human mammal, domestic animal, such as a dog, cat, cow, horse, and the like), and is preferably a human. In another embodiment, the subject is an animal model of cancer. For example, the animal model can be an orthotopic xenograft animal model of a human-derived cancer.

[0247] In another embodiment of the methods of the present invention, the subject has not undergone treatment, such as chemotherapy, radiation therapy, targeted therapy, and/or immunotherapies. In still another embodiment, the subject has undergone treatment, such as chemotherapy, radiation therapy, targeted therapy, and/or immunotherapies.

[0248] In certain embodiments, the subject has had surgery to remove cancerous or precancerous tissue. In other embodiments, the cancerous tissue has not been removed, e.g., the cancerous tissue may be located in an inoperable region of the body, such as in a tissue that is essential for life, or in a region where a surgical procedure would cause considerable risk of harm to the patient.

[0249] The methods of the present invention can be used to determine the responsiveness to the agent for treating a cancer. In one embodiment, the cancer is synovial sarcoma.

### III. Sample Collection, Preparation and Separation

[0250] In some embodiments, biomarker amount and/or activity measurement(s) in a sample from a subject is compared to a predetermined control (standard) sample. The sample from the subject is typically from a diseased tissue, such as cancer cells or tissues. The control sample can be from the same subject or from a different subject. The control sample is typically a normal, non-diseased sample. However, in some embodiments, such as for staging of disease or for evaluating the efficacy of treatment, the control sample can be from a diseased tissue. The control sample can be a combination of samples from several different subjects. In some embodiments, the biomarker amount and/or activity measurement(s) from a subject is compared to a pre-determined level. This pre-determined level is typically obtained from normal samples. As described herein, a “pre-determined” biomarker amount and/or activity measurement(s) may be a biomarker amount and/or activity measurement(s) used to, by way of example only, evaluate a subject that may be selected for treatment, evaluate a response to cancer therapy (e.g., an agent that inhibits binding of a SS18-SSX fusion protein to an H2A K119Ub-marked nucleosome), and/or evaluate a response to a combination cancer therapy (e.g., an agent that inhibits binding of a SS18-SSX fusion protein to an H2A K119Ub-marked nucleosome in combination of at least one immunotherapy). A pre-determined biomarker amount and/or activity measurement(s) may be determined in populations of patients with or without cancer. The pre-determined biomarker amount and/or activity measurement(s) can be a single number, equally applicable to every patient, or the pre-determined biomarker amount and/or activity measurement(s) can vary according to specific subpopulations of patients. Age, weight, height, and other factors of a subject may affect the pre-determined biomarker amount and/or activity measurement(s) of the individual. Furthermore, the pre-determined biomarker amount and/or activity can be determined for each subject individually. In one embodiment, the amounts determined and/or compared in a method described herein are based on absolute measurements.

[0251] In another embodiment, the amounts determined and/or compared in a method described herein are based on relative measurements, such as ratios (e.g., biomarker copy numbers, level, and/or activity before a treatment vs. after a treatment, such biomarker measurements relative to a spiked or man-made control, such biomarker measurements relative to the expression of a housekeeping gene, and the like). For example, the relative analysis can be based on the ratio of pre-treatment biomarker measurement as compared to post-treatment biomarker measurement. Pre-treatment biomarker measurement can be made at any time prior to initiation of cancer therapy. Post-treatment biomarker measurement can be made at any time after initiation of cancer therapy. In some embodiments, post-treatment biomarker measurements are made 1, 2, 3, 4, 5, 6, 7, 8, 9, 10, 11, 12, 13, 14, 15, 16, 17, 18, 19, 20 weeks or more after initiation of cancer therapy, and even longer toward indefinitely for continued monitoring. Treatment can comprise cancer therapy, such as a therapeutic regimen comprising an agent that inhibits binding of a SS18-SSX fusion protein to an H2A K119Ub-marked nucleosome, or in combination with other cancer agents, such as with immune checkpoint inhibitors.

[0252] The pre-determined biomarker amount and/or activity measurement(s) can be any suitable standard. For example, the pre-determined biomarker amount and/or activity measurement(s) can be obtained from the same or a different human for whom a patient selection is being assessed. In one embodiment, the pre-determined biomarker amount and/or activity measurement(s) can be obtained from a previous assessment of the same patient. In such a manner, the progress of the selection of the patient can be monitored over time. In addition, the control can be obtained from an assessment of another human or multiple humans, e.g., selected groups of humans, if the subject is a human. In such a manner, the extent of the selection of the human for whom selection is being assessed can be compared to suitable other humans, e.g., other humans who are in a similar situation to the human of interest, such as those suffering from similar or the same condition(s) and/or of the same ethnic group.

[0253] In some embodiments of the present invention the change of biomarker amount and/or activity measurement(s) from the pre-determined level is about 0.1, 0.2, 0.3, 0.4, 0.5, 0.6, 0.7, 0.8, 0.9, 1.0, 1.5, 2.0, 2.5, 3.0, 3.5, 4.0, 4.5, or 5.0 fold or greater, or any range in between, inclusive. Such cutoff values apply equally when the measurement is based on relative changes, such as based on the ratio of pre-treatment biomarker measurement as compared to post-treatment biomarker measurement.

[0254] Biological samples can be collected from a variety of sources from a patient including a body fluid sample, cell sample, or a tissue sample comprising nucleic acids and/or proteins. “Body fluids” refer to fluids that are excreted or secreted from the body as well as fluids that are normally not (e.g., amniotic fluid, aqueous humor, bile, blood and blood plasma, cerebrospinal fluid, cerumen and earwax, cowper's fluid or pre-ejaculatory fluid, chyle, chyme, stool, female ejaculate, interstitial fluid, intracellular fluid, lymph, menses, breast milk, mucus, pleural fluid, pus, saliva, sebum, semen, serum, sweat, synovial fluid, tears, urine, vaginal lubrication, vitreous humor, vomit). In a preferred embodiment, the subject and/or control sample is selected from the group consisting of cells, cell lines, histological slides, paraffin embedded tissues, biopsies, whole blood, nipple aspirate, serum, plasma, buccal scrape, saliva, cerebrospinal fluid, urine, stool, and bone marrow. In one embodiment, the sample is serum, plasma, or urine. In another embodiment, the sample is serum.

[0255] The samples can be collected from individuals repeatedly over a longitudinal period of time (e.g., once or more on the order of days, weeks, months, annually, biannually, etc.). Obtaining numerous samples from an individual over a period of time can be used to verify results from earlier detections and/or to identify an alteration in biological pattern as a result of, for example, disease progression, drug treatment, etc. For example, subject samples can be taken and monitored every month, every two months, or combinations of one, two, or three month intervals according to the present invention. In addition, the biomarker amount and/or activity measurements of the subject obtained over time can be conveniently compared with each other, as well as with those of normal controls during the monitoring period, thereby providing the subject's own values, as an internal, or personal, control for long-term monitoring.

[0256] Sample preparation and separation can involve any of the procedures, depending on the type of sample collected and/or analysis of biomarker measurement(s). Such procedures include, by way of example only, concentration, dilution, adjustment of pH, removal of high abundance polypeptides (e.g., albumin, gamma globulin, and transferrin, etc.), addition of preservatives and calibrants, addition of protease inhibitors, addition of denaturants, desalting of samples, concentration of sample proteins, extraction and purification of lipids.

[0257] The sample preparation can also isolate molecules that are bound in non-covalent complexes to other protein (e.g., carrier proteins). This process may isolate those molecules bound to a specific carrier protein (e.g., albumin), or use a more general process, such as the release of bound molecules from all carrier proteins via protein denaturation, for example using an acid, followed by removal of the carrier proteins.

[0258] Removal of undesired proteins (e.g., high abundance, uninformative, or undetectable proteins) from a sample can be achieved using high affinity reagents, high molecular weight filters, ultracentrifugation and/or electrodialysis. High affinity reagents include antibodies or other reagents (e.g., aptamers) that selectively bind to high abundance proteins. Sample preparation could also include ion exchange chromatography, metal ion affinity chromatography, gel filtration, hydrophobic chromatography, chromatofocusing, adsorption chromatography, isoelectric focusing and related techniques. Molecular weight filters include membranes that separate molecules on the basis of size and molecular weight. Such filters may further employ reverse osmosis, nanofiltration, ultrafiltration and microfiltration.

[0259] Ultracentrifugation is a method for removing undesired polypeptides from a sample. Ultracentrifugation is the centrifugation of a sample at about 15,000-60,000 rpm while monitoring with an optical system the sedimentation (or lack thereof) of particles. Electrodialysis is a procedure which uses an electromembrane or semipermable membrane in a process in which ions are transported through semi-permeable membranes from one solution to another under the influence of a potential gradient. Since the membranes used in electrodialysis may have the ability to selectively transport ions having positive or negative charge, reject ions of the opposite charge, or to allow species to migrate through a semipermable membrane based on size and charge, it renders electrodialysis useful for concentration, removal, or separation of electrolytes.

[0260] Separation and purification in the present invention may include any procedure known in the art, such as capillary electrophoresis (e.g., in capillary or on-chip) or chromatography (e.g., in capillary, column or on a chip). Electrophoresis is a method which can be used to separate ionic molecules under the influence of an electric field. Electrophoresis can be conducted in a gel, capillary, or in a microchannel on a chip. Examples of gels used for electrophoresis include starch, acrylamide, polyethylene oxides, agarose, or combinations thereof. A gel can be modified by its cross-linking, addition of detergents, or denaturants, immobilization of enzymes or antibodies (affinity electrophoresis) or substrates (zymography) and incorporation of a pH gradient. Examples of capillaries used for electrophoresis include capillaries that interface with an electrospray.

[0261] Capillary electrophoresis (CE) is preferred for separating complex hydrophilic molecules and highly charged solutes. CE technology can also be implemented on microfluidic chips. Depending on the types of capillary and buffers used, CE can be further segmented into separation techniques such as capillary zone electrophoresis (CZE), capillary isoelectric focusing (CIEF), capillary isotachophoresis (cITP) and capillary electrochromatography (CEC). An embodiment to couple CE techniques to electrospray ionization involves the use of volatile solutions, for example, aqueous mixtures containing a volatile acid and/or base and an organic such as an alcohol or acetonitrile.

[0262] Capillary isotachophoresis (cITP) is a technique in which the analytes move through the capillary at a constant speed but are nevertheless separated by their respective mobilities. Capillary zone electrophoresis (CZE), also known as free-solution CE (FSCE), is based on differences in the electrophoretic mobility of the species, determined by the charge on the molecule, and the frictional resistance the molecule encounters during migration which is often directly proportional to the size of the molecule. Capillary isoelectric focusing (CIEF) allows weakly-ionizable amphoteric molecules, to be separated by electrophoresis in a pH gradient. CEC is a hybrid technique between traditional high performance liquid chromatography (HPLC) and CE.

[0263] Separation and purification techniques used in the present invention include any chromatography procedures known in the art. Chromatography can be based on the differential adsorption and elution of certain analytes or partitioning of analytes between mobile and stationary phases. Different examples of chromatography include, but not limited to, liquid chromatography (LC), gas chromatography (GC), high performance liquid chromatography (HPLC), etc.

### IV. Biomarker Nucleic Acids and Polypeptides

[0264] One aspect of the present invention pertains to the use of isolated nucleic acid molecules that correspond to biomarker nucleic acids that encode a biomarker polypeptide or a portion of such a polypeptide. As used herein, the term “nucleic acid molecule” is intended to include DNA molecules (e.g., cDNA or genomic DNA) and RNA molecules (e.g., mRNA) and analogs of the DNA or RNA generated using nucleotide analogs. The nucleic acid molecule can be single-stranded or double-stranded, but preferably is double-stranded DNA.

[0265] An “isolated” nucleic acid molecule is one which is separated from other nucleic acid molecules which are present in the natural source of the nucleic acid molecule. Preferably, an “isolated” nucleic acid molecule is free of sequences (preferably protein-encoding sequences) which naturally flank the nucleic acid (i.e., sequences located at the 5′ and 3′ ends of the nucleic acid) in the genomic DNA of the organism from which the nucleic acid is derived. For example, in various embodiments, the isolated nucleic acid molecule can contain less than about 5 kB, 4 kB, 3 kB, 2 kB, 1 kB, 0.5 kB or 0.1 kB of nucleotide sequences which naturally flank the nucleic acid molecule in genomic DNA of the cell from which the nucleic acid is derived. Moreover, an “isolated” nucleic acid molecule, such as a cDNA molecule, can be substantially free of other cellular material or culture medium when produced by recombinant techniques, or substantially free of chemical precursors or other chemicals when chemically synthesized.

[0266] A biomarker nucleic acid molecule of the present invention can be isolated using standard molecular biology techniques and the sequence information in the database records described herein. Using all or a portion of such nucleic acid sequences, nucleic acid molecules of the present invention can be isolated using standard hybridization and cloning techniques (e.g., as described in Sambrook et al., ed., Molecular Cloning: A Laboratory Manual, 2nd ed., Cold Spring Harbor Laboratory Press, Cold Spring Harbor, NY, 1989).

[0267] A nucleic acid molecule of the present invention can be amplified using cDNA, mRNA, or genomic DNA as a template and appropriate oligonucleotide primers according to standard PCR amplification techniques. The nucleic acid molecules so amplified can be cloned into an appropriate vector and characterized by DNA sequence analysis. Furthermore, oligonucleotides corresponding to all or a portion of a nucleic acid molecule of the present invention can be prepared by standard synthetic techniques, e.g., using an automated DNA synthesizer.

[0268] Moreover, a nucleic acid molecule of the present invention can comprise only a portion of a nucleic acid sequence, wherein the full length nucleic acid sequence comprises a marker of the present invention or which encodes a polypeptide corresponding to a marker of the present invention. Such nucleic acid molecules can be used, for example, as a probe or primer. The probe/primer typically is used as one or more substantially purified oligonucleotides. The oligonucleotide typically comprises a region of nucleotide sequence that hybridizes under stringent conditions to at least about 7, preferably about 15, more preferably about 25, 50, 75, 100, 125, 150, 175, 200, 250, 300, 350, or 400 or more consecutive nucleotides of a biomarker nucleic acid sequence. Probes based on the sequence of a biomarker nucleic acid molecule can be used to detect transcripts or genomic sequences corresponding to one or more markers of the present invention. The probe comprises a label group attached thereto, e.g., a radioisotope, a fluorescent compound, an enzyme, or an enzyme co-factor.

[0269] A biomarker nucleic acid molecules that differ, due to degeneracy of the genetic code, from the nucleotide sequence of nucleic acid molecules encoding a protein which corresponds to the biomarker, and thus encode the same protein, are also contemplated.

[0270] In addition, it will be appreciated by those skilled in the art that DNA sequence polymorphisms that lead to changes in the amino acid sequence can exist within a population (e.g., the human population). Such genetic polymorphisms can exist among individuals within a population due to natural allelic variation. An allele is one of a group of genes which occur alternatively at a given genetic locus. In addition, it will be appreciated that DNA polymorphisms that affect RNA expression levels can also exist that may affect the overall expression level of that gene (e.g., by affecting regulation or degradation).

[0271] The term “allele,” which is used interchangeably herein with “allelic variant,” refers to alternative forms of a gene or portions thereof. Alleles occupy the same locus or position on homologous chromosomes. When a subject has two identical alleles of a gene, the subject is said to be homozygous for the gene or allele. When a subject has two different alleles of a gene, the subject is said to be heterozygous for the gene or allele. For example, biomarker alleles can differ from each other in a single nucleotide, or several nucleotides, and can include substitutions, deletions, and insertions of nucleotides. An allele of a gene can also be a form of a gene containing one or more mutations.

[0272] The term “allelic variant of a polymorphic region of gene” or “allelic variant”, used interchangeably herein, refers to an alternative form of a gene having one of several possible nucleotide sequences found in that region of the gene in the population. As used herein, allelic variant is meant to encompass functional allelic variants, non-functional allelic variants, SNPs, mutations and polymorphisms.

[0273] The term “single nucleotide polymorphism” (SNP) refers to a polymorphic site occupied by a single nucleotide, which is the site of variation between allelic sequences. The site is usually preceded by and followed by highly conserved sequences of the allele (e.g., sequences that vary in less than 1/100 or 1/1000 members of a population). A SNP usually arises due to substitution of one nucleotide for another at the polymorphic site. SNPs can also arise from a deletion of a nucleotide or an insertion of a nucleotide relative to a reference allele. Typically the polymorphic site is occupied by a base other than the reference base. For example, where the reference allele contains the base “T” (thymidine) at the polymorphic site, the altered allele can contain a “C” (cytidine), “G” (guanine), or “A” (adenine) at the polymorphic site. SNP's may occur in protein-coding nucleic acid sequences, in which case they may give rise to a defective or otherwise variant protein, or genetic disease. Such a SNP may alter the coding sequence of the gene and therefore specify another amino acid (a “missense” SNP) or a SNP may introduce a stop codon (a “nonsense” SNP). When a SNP does not alter the amino acid sequence of a protein, the SNP is called “silent.” SNP's may also occur in noncoding regions of the nucleotide sequence. This may result in defective protein expression, e.g., as a result of alternative spicing, or it may have no effect on the function of the protein.

[0274] As used herein, the terms “gene” and “recombinant gene” refer to nucleic acid molecules comprising an open reading frame encoding a polypeptide corresponding to a marker of the present invention. Such natural allelic variations can typically result in 1-5% variance in the nucleotide sequence of a given gene. Alternative alleles can be identified by sequencing the gene of interest in a number of different individuals. This can be readily carried out by using hybridization probes to identify the same genetic locus in a variety of individuals. Any and all such nucleotide variations and resulting amino acid polymorphisms or variations that are the result of natural allelic variation and that do not alter the functional activity are intended to be within the scope of the present invention.

[0275] In another embodiment, a biomarker nucleic acid molecule is at least 7, 15, 20, 25, 30, 40, 60, 80, 100, 150, 200, 250, 300, 350, 400, 450, 550, 650, 700, 800, 900, 1000, 1100, 1200, 1300, 1400, 1500, 1600, 1700, 1800, 1900, 2000, 2200, 2400, 2600, 2800, 3000, 3500, 4000, 4500, or more nucleotides in length and hybridizes under stringent conditions to a nucleic acid molecule corresponding to a marker of the present invention or to a nucleic acid molecule encoding a protein corresponding to a marker of the present invention. As used herein, the term “hybridizes under stringent conditions” is intended to describe conditions for hybridization and washing under which nucleotide sequences at least 60% (65%, 70%, 75%, 80%, preferably 85%) identical to each other typically remain hybridized to each other. Such stringent conditions are known to those skilled in the art and can be found in sections 6.3.1-6.3.6 of Current Protocols in Molecular Biology, John Wiley & Sons, N.Y. (1989). A preferred, non-limiting example of stringent hybridization conditions are hybridization in 6× sodium chloride/sodium citrate (SSC) at about 45° C., followed by one or more washes in 0.2×SSC, 0.1% SDS at 50-65° C.

[0276] In addition to naturally-occurring allelic variants of a nucleic acid molecule of the present invention that can exist in the population, the skilled artisan will further appreciate that sequence changes can be introduced by mutation thereby leading to changes in the amino acid sequence of the encoded protein, without altering the biological activity of the protein encoded thereby. For example, one can make nucleotide substitutions leading to amino acid substitutions at “non-essential” amino acid residues. A “non-essential” amino acid residue is a residue that can be altered from the wild-type sequence without altering the biological activity, whereas an “essential” amino acid residue is required for biological activity. For example, amino acid residues that are not conserved or only semi-conserved among homologs of various species may be non-essential for activity and thus would be likely targets for alteration. Alternatively, amino acid residues that are conserved among the homologs of various species (e.g., murine and human) may be essential for activity and thus would not be likely targets for alteration.

[0277] Accordingly, another aspect of the present invention pertains to nucleic acid molecules encoding a polypeptide of the present invention that contain changes in amino acid residues that are not essential for activity. Such polypeptides differ in amino acid sequence from the naturally-occurring proteins which correspond to the markers of the present invention, yet retain biological activity. In one embodiment, a biomarker protein has an amino acid sequence that is at least about 40% identical, 50%, 60%, 70%, 75%, 80%, 83%, 85%, 87.5%, 90%, 91%, 92%, 93%, 94%, 95%, 96%, 97%, 98%, 99% or identical to the amino acid sequence of a biomarker protein described herein.

[0278] An isolated nucleic acid molecule encoding a variant protein can be created by introducing one or more nucleotide substitutions, additions or deletions into the nucleotide sequence of nucleic acids of the present invention, such that one or more amino acid residue substitutions, additions, or deletions are introduced into the encoded protein. Mutations can be introduced by standard techniques, such as site-directed mutagenesis and PCR-mediated mutagenesis. Preferably, conservative amino acid substitutions are made at one or more predicted non-essential amino acid residues. A “conservative amino acid substitution” is one in which the amino acid residue is replaced with an amino acid residue having a similar side chain. Families of amino acid residues having similar side chains have been defined in the art. These families include amino acids with basic side chains (e.g., lysine, arginine, histidine), acidic side chains (e.g., aspartic acid, glutamic acid), uncharged polar side chains (e.g., glycine, asparagine, glutamine, serine, threonine, tyrosine, cysteine), non-polar side chains (e.g., alanine, valine, leucine, isoleucine, proline, phenylalanine, methionine, tryptophan), beta-branched side chains (e.g., threonine, valine, isoleucine) and aromatic side chains (e.g., tyrosine, phenylalanine, tryptophan, histidine). Alternatively, mutations can be introduced randomly along all or part of the coding sequence, such as by saturation mutagenesis, and the resultant mutants can be screened for biological activity to identify mutants that retain activity. Following mutagenesis, the encoded protein can be expressed recombinantly and the activity of the protein can be determined.

[0279] In some embodiments, the present invention further contemplates the use of anti-biomarker antisense nucleic acid molecules, i.e., molecules which are complementary to a sense nucleic acid of the present invention, e.g., complementary to the coding strand of a double-stranded cDNA molecule corresponding to a marker of the present invention or complementary to an mRNA sequence corresponding to a marker of the present invention. Accordingly, an antisense nucleic acid molecule of the present invention can hydrogen bond to (i.e. anneal with) a sense nucleic acid of the present invention. The antisense nucleic acid can be complementary to an entire coding strand, or to only a portion thereof, e.g., all or part of the protein coding region (or open reading frame). An antisense nucleic acid molecule can also be antisense to all or part of a non-coding region of the coding strand of a nucleotide sequence encoding a polypeptide of the present invention. The non-coding regions (“5′ and 3′ untranslated regions”) are the 5′ and 3′ sequences which flank the coding region and are not translated into amino acids.

[0280] An antisense oligonucleotide can be, for example, about 5, 10, 15, 20, 25, 30, 35, 40, 45, or 50 or more nucleotides in length. An antisense nucleic acid can be constructed using chemical synthesis and enzymatic ligation reactions using procedures known in the art. For example, an antisense nucleic acid (e.g., an antisense oligonucleotide) can be chemically synthesized using naturally occurring nucleotides or variously modified nucleotides designed to increase the biological stability of the molecules or to increase the physical stability of the duplex formed between the antisense and sense nucleic acids, e.g., phosphorothioate derivatives and acridine substituted nucleotides can be used. Examples of modified nucleotides which can be used to generate the antisense nucleic acid include 5-fluorouracil, 5-bromouracil, 5-chlorouracil, 5-iodouracil, hypoxanthine, xanthine, 4-acetylcytosine, 5-(carboxyhydroxylmethyl) uracil, 5-carboxymethylaminomethyl-2-thiouridine, 5-carboxymethylaminomethyluracil, dihydrouracil, beta-D-galactosylqueosine, inosine, N6-isopentenyladenine, 1-methylguanine, 1-methylinosine, 2,2-dimethylguanine, 2-methyladenine, 2-methylguanine, 3-methylcytosine, 5-methylcytosine, N6-adenine, 7-methylguanine, 5-methylaminomethyluracil, 5-methoxyaminomethyl-2-thiouracil, beta-D-mannosylqueosine, 5′-methoxycarboxymethyluracil, 5-methoxyuracil, 2-methylthio-N6-isopentenyladenine, uracil-5-oxyacetic acid (v), wybutoxosine, pseudouracil, queosine, 2-thiocytosine, 5-methyl-2-thiouracil, 2-thiouracil, 4-thiouracil, 5-methyluracil, uracil-5-oxyacetic acid methylester, uracil-5-oxyacetic acid (v), 5-methyl-2-thiouracil, 3-(3-amino-3-N-2-carboxypropyl) uracil, (acp3)w, and 2,6-diaminopurine. Alternatively, the antisense nucleic acid can be produced biologically using an expression vector into which a nucleic acid has been sub-cloned in an antisense orientation (i.e., RNA transcribed from the inserted nucleic acid will be of an antisense orientation to a target nucleic acid of interest, described further in the following subsection).

[0281] The antisense nucleic acid molecules of the present invention are typically administered to a subject or generated in situ such that they hybridize with or bind to cellular mRNA and/or genomic DNA encoding a polypeptide corresponding to a selected marker of the present invention to thereby inhibit expression of the marker, e.g., by inhibiting transcription and/or translation. The hybridization can be by conventional nucleotide complementarity to form a stable duplex, or, for example, in the case of an antisense nucleic acid molecule which binds to DNA duplexes, through specific interactions in the major groove of the double helix. Examples of a route of administration of antisense nucleic acid molecules of the present invention includes direct injection at a tissue site or infusion of the antisense nucleic acid into a blood- or bone marrow-associated body fluid.

[0282] Alternatively, antisense nucleic acid molecules can be modified to target selected cells and then administered systemically. For example, for systemic administration, antisense molecules can be modified such that they specifically bind to receptors or antigens expressed on a selected cell surface, e.g., by linking the antisense nucleic acid molecules to peptides or antibodies which bind to cell surface receptors or antigens. The antisense nucleic acid molecules can also be delivered to cells using the vectors described herein. To achieve sufficient intracellular concentrations of the antisense molecules, vector constructs in which the antisense nucleic acid molecule is placed under the control of a strong pol II or pol III promoter are preferred.

[0283] An antisense nucleic acid molecule of the present invention can be an a-anomeric nucleic acid molecule. An a-anomeric nucleic acid molecule forms specific double-stranded hybrids with complementary RNA in which, contrary to the usual α-units, the strands run parallel to each other (Gaultier et al. (1987) Nucleic Acids Res. 15:6625-6641). The antisense nucleic acid molecule can also comprise a 2′-o-methylribonucleotide (Inoue et al. (1987) Nucleic Acids Res. 15:6131-6148) or a chimeric RNA-DNA analogue (Inoue et al. (1987) FEBS Lett. 215:327-330).

[0284] The present invention also encompasses ribozymes. Ribozymes are catalytic RNA molecules with ribonuclease activity which are capable of cleaving a single-stranded nucleic acid, such as an mRNA, to which they have a complementary region. Thus, ribozymes (e.g., hammerhead ribozymes as described in Haselhoff and Gerlach (1988) Nature 334:585-591) can be used to catalytically cleave mRNA transcripts to thereby inhibit translation of the protein encoded by the mRNA. A ribozyme having specificity for a nucleic acid molecule encoding a polypeptide corresponding to a marker of the present invention can be designed based upon the nucleotide sequence of a cDNA corresponding to the marker. For example, a derivative of a Tetrahymena L-19 IVS RNA can be constructed in which the nucleotide sequence of the active site is complementary to the nucleotide sequence to be cleaved (see Cech et al. U.S. Pat. No. 4,987,071; and Cech et al. U.S. Pat. No. 5,116,742). Alternatively, an mRNA encoding a polypeptide of the present invention can be used to select a catalytic RNA having a specific ribonuclease activity from a pool of RNA molecules (see, e.g., Bartel and Szostak (1993) Science 261:1411-1418).

[0285] The present invention also encompasses nucleic acid molecules which form triple helical structures. For example, expression of a biomarker protein can be inhibited by targeting nucleotide sequences complementary to the regulatory region of the gene encoding the polypeptide (e.g., the promoter and/or enhancer) to form triple helical structures that prevent transcription of the gene in target cells. See generally Helene (1991) Anticancer Drug Des. 6(6):569-84; Helene (1992) Ann. N. Y. Acad. Sci. 660:27-36; and Maher (1992) Bioassays 14(12):807-15.

[0286] In various embodiments, the nucleic acid molecules of the present invention can be modified at the base moiety, sugar moiety or phosphate backbone to improve, e.g., the stability, hybridization, or solubility of the molecule. For example, the deoxyribose phosphate backbone of the nucleic acid molecules can be modified to generate peptide nucleic acid molecules (see Hyrup et al. (1996) Bioorganic & Medicinal Chemistry 4(1): 5-23). As used herein, the terms “peptide nucleic acids” or “PNAs” refer to nucleic acid mimics, e.g., DNA mimics, in which the deoxyribose phosphate backbone is replaced by a pseudopeptide backbone and only the four natural nucleobases are retained. The neutral backbone of PNAs has been shown to allow for specific hybridization to DNA and RNA under conditions of low ionic strength. The synthesis of PNA oligomers can be performed using standard solid phase peptide synthesis protocols as described in Hyrup et al. (1996), supra; Perry-O'Keefe et al. (1996) Proc. Natl. Acad. Sci. USA 93:14670-675.

[0287] PNAs can be used in therapeutic and diagnostic applications. For example, PNAs can be used as antisense or antigene agents for sequence-specific modulation of gene expression by, e.g., inducing transcription or translation arrest or inhibiting replication. PNAs can also be used, e.g., in the analysis of single base pair mutations in a gene by, e.g., PNA directed PCR clamping; as artificial restriction enzymes when used in combination with other enzymes, e.g., S1 nucleases (Hyrup (1996), supra; or as probes or primers for DNA sequence and hybridization (Hyrup (1996), supra; Perry-O'Keefe et al. (1996) Proc. Natl. Acad. Sci. USA 93:14670-14675).

[0288] In another embodiment, PNAs can be modified, e.g., to enhance their stability or cellular uptake, by attaching lipophilic or other helper groups to PNA, by the formation of PNA-DNA chimeras, or by the use of liposomes or other techniques of drug delivery known in the art. For example, PNA-DNA chimeras can be generated which can combine the advantageous properties of PNA and DNA. Such chimeras allow DNA recognition enzymes, e.g., RNASE H and DNA polymerases, to interact with the DNA portion while the PNA portion would provide high binding affinity and specificity. PNA-DNA chimeras can be linked using linkers of appropriate lengths selected in terms of base stacking, number of bonds between the nucleobases, and orientation (Hyrup (1996), supra). The synthesis of PNA-DNA chimeras can be performed as described in Hyrup (1996), supra, and Finn et al. (1996) Nucleic Acids Res. 24(17):3357-3363. For example, a DNA chain can be synthesized on a solid support using standard phosphoramidite coupling chemistry and modified nucleoside analogs. Compounds such as 5′-(4-methoxytrityl)amino-5′-deoxy-thymidine phosphoramidite can be used as a link between the PNA and the 5′ end of DNA (Mag et al. (1989) Nucleic Acids Res. 17:5973-5988). PNA monomers are then coupled in a step-wise manner to produce a chimeric molecule with a 5′ PNA segment and a 3′ DNA segment (Finn et al. (1996) Nucleic Acids Res. 24:3357-3363). Alternatively, chimeric molecules can be synthesized with a 5′ DNA segment and a 3′ PNA segment (Peterser et al. (1975) Bioorganic Med. Chem. Lett. 5:1119-11124).

[0289] In other embodiments, the oligonucleotide can include other appended groups such as peptides (e.g., for targeting host cell receptors in vivo), or agents facilitating transport across the cell membrane (see, e.g., Letsinger et al. (1989) Proc. Natl. Acad. Sci. USA 86:6553-6556; Lemaitre et al. (1987) Proc. Natl. Acad. Sci. USA 84:648-652; PCT Publication No. WO 88/09810) or the blood-brain barrier (see, e.g., PCT Publication No. WO 89/10134). In addition, oligonucleotides can be modified with hybridization-triggered cleavage agents (see, e.g., Krol et al. (1988) Bio/Techniques 6:958-976) or intercalating agents (see, e.g., Zon (1988) Pharm. Res. 5:539-549). To this end, the oligonucleotide can be conjugated to another molecule, e.g., a peptide, hybridization triggered cross-linking agent, transport agent, hybridization-triggered cleavage agent, etc.

[0290] Another aspect of the present invention pertains to the use of biomarker proteins and biologically active portions thereof. In one embodiment, the native polypeptide corresponding to a marker can be isolated from cells or tissue sources by an appropriate purification scheme using standard protein purification techniques. In another embodiment, polypeptides corresponding to a marker of the present invention are produced by recombinant DNA techniques. Alternative to recombinant expression, a polypeptide corresponding to a marker of the present invention can be synthesized chemically using standard peptide synthesis techniques.

[0291] An “isolated” or “purified” protein or biologically active portion thereof is substantially free of cellular material or other contaminating proteins from the cell or tissue source from which the protein is derived, or substantially free of chemical precursors or other chemicals when chemically synthesized. The language “substantially free of cellular material” includes preparations of protein in which the protein is separated from cellular components of the cells from which it is isolated or recombinantly produced. Thus, protein that is substantially free of cellular material includes preparations of protein having less than about 30%, 20%, 10%, or 5% (by dry weight) of heterologous protein (also referred to herein as a “contaminating protein”). When the protein or biologically active portion thereof is recombinantly produced, it is also preferably substantially free of culture medium, i.e., culture medium represents less than about 20%, 10%, or 5% of the volume of the protein preparation. When the protein is produced by chemical synthesis, it is preferably substantially free of chemical precursors or other chemicals, i.e., it is separated from chemical precursors or other chemicals which are involved in the synthesis of the protein. Accordingly such preparations of the protein have less than about 30%, 20%, 10%, 5% (by dry weight) of chemical precursors or compounds other than the polypeptide of interest.

[0292] Biologically active portions of a biomarker polypeptide include polypeptides comprising amino acid sequences sufficiently identical to or derived from a biomarker protein amino acid sequence described herein, but which includes fewer amino acids than the full length protein, and exhibit at least one activity of the corresponding full-length protein. Typically, biologically active portions comprise a domain or motif with at least one activity of the corresponding protein. A biologically active portion of a protein of the present invention can be a polypeptide which is, for example, 10, 25, 50, 100 or more amino acids in length. Moreover, other biologically active portions, in which other regions of the protein are deleted, can be prepared by recombinant techniques and evaluated for one or more of the functional activities of the native form of a polypeptide of the present invention.

[0293] Preferred polypeptides have an amino acid sequence of a biomarker protein encoded by a nucleic acid molecule described herein. Other useful proteins are substantially identical (e.g., at least about 40%, preferably 50%, 60%, 70%, 75%, 80%, 83%, 85%, 88%, 90%, 91%, 92%, 93%, 94%, 95%, 96%, 97%, 98%, or 99%) to one of these sequences and retain the functional activity of the protein of the corresponding naturally-occurring protein yet differ in amino acid sequence due to natural allelic variation or mutagenesis.

[0294] To determine the percent identity of two amino acid sequences or of two nucleic acids, the sequences are aligned for optimal comparison purposes (e.g., gaps can be introduced in the sequence of a first amino acid or nucleic acid sequence for optimal alignment with a second amino or nucleic acid sequence). The amino acid residues or nucleotides at corresponding amino acid positions or nucleotide positions are then compared. When a position in the first sequence is occupied by the same amino acid residue or nucleotide as the corresponding position in the second sequence, then the molecules are identical at that position. The percent identity between the two sequences is a function of the number of identical positions shared by the sequences (i.e., % identity=# of identical positions/total # of positions (e.g., overlapping positions)×100). In one embodiment the two sequences are the same length.

[0295] The determination of percent identity between two sequences can be accomplished using a mathematical algorithm. A preferred, non-limiting example of a mathematical algorithm utilized for the comparison of two sequences is the algorithm of Karlin and Altschul (1990) Proc. Natl. Acad. Sci. USA 87:2264-2268, modified as in Karlin and Altschul (1993) Proc. Natl. Acad. Sci. USA 90:5873-5877. Such an algorithm is incorporated into the NBLAST and XBLAST programs of Altschul, et al. (1990) J. Mol. Biol. 215:403-410. BLAST nucleotide searches can be performed with the NBLAST program, score=100, wordlength=12 to obtain nucleotide sequences homologous to a nucleic acid molecules of the present invention. BLAST protein searches can be performed with the XBLAST program, score=50, wordlength=3 to obtain amino acid sequences homologous to a protein molecules of the present invention. To obtain gapped alignments for comparison purposes, Gapped BLAST can be utilized as described in Altschul et al. (1997) Nucleic Acids Res. 25:3389-3402. Alternatively, PSI-Blast can be used to perform an iterated search which detects distant relationships between molecules. When utilizing BLAST, Gapped BLAST, and PSI-Blast programs, the default parameters of the respective programs (e.g., XBLAST and NBLAST) can be used. See world wide web ncbi.nlm.nih.gov. Another preferred, non-limiting example of a mathematical algorithm utilized for the comparison of sequences is the algorithm of Myers and Miller, (1988) Comput Appl Biosci, 4:11-7. Such an algorithm is incorporated into the ALIGN program (version 2.0) which is part of the GCG sequence alignment software package. When utilizing the ALIGN program for comparing amino acid sequences, a PAM120 weight residue table, a gap length penalty of 12, and a gap penalty of 4 can be used. Yet another useful algorithm for identifying regions of local sequence similarity and alignment is the FASTA algorithm as described in Pearson and Lipman (1988) Proc. Natl. Acad. Sci. USA 85:2444-2448. When using the FASTA algorithm for comparing nucleotide or amino acid sequences, a PAM120 weight residue table can, for example, be used with a k-tuple value of 2.

[0296] The percent identity between two sequences can be determined using techniques similar to those described above, with or without allowing gaps. In calculating percent identity, only exact matches are counted.

[0297] The present invention also provides chimeric or fusion proteins corresponding to a biomarker protein. As used herein, a “chimeric protein” or “fusion protein” comprises all or part (preferably a biologically active part) of a polypeptide corresponding to a marker of the present invention operably linked to a heterologous polypeptide (i.e., a polypeptide other than the polypeptide corresponding to the marker). Within the fusion protein, the term “operably linked” is intended to indicate that the polypeptide of the present invention and the heterologous polypeptide are fused in-frame to each other. The heterologous polypeptide can be fused to the amino-terminus or the carboxyl-terminus of the polypeptide of the present invention.

[0298] One useful fusion protein is a GST fusion protein in which a polypeptide corresponding to a marker of the present invention is fused to the carboxyl terminus of GST sequences. Such fusion proteins can facilitate the purification of a recombinant polypeptide of the present invention.

[0299] In another embodiment, the fusion protein contains a heterologous signal sequence, immunoglobulin fusion protein, toxin, or other useful protein sequence. Chimeric and fusion proteins of the present invention can be produced by standard recombinant DNA techniques. In another embodiment, the fusion gene can be synthesized by conventional techniques including automated DNA synthesizers. Alternatively, PCR amplification of gene fragments can be carried out using anchor primers which give rise to complementary overhangs between two consecutive gene fragments which can subsequently be annealed and re-amplified to generate a chimeric gene sequence (see, e.g., Ausubel et al., supra). Moreover, many expression vectors are commercially available that already encode a fusion moiety (e.g., a GST polypeptide). A nucleic acid encoding a polypeptide of the present invention can be cloned into such an expression vector such that the fusion moiety is linked in-frame to the polypeptide of the present invention.

[0300] A signal sequence can be used to facilitate secretion and isolation of the secreted protein or other proteins of interest. Signal sequences are typically characterized by a core of hydrophobic amino acids which are generally cleaved from the mature protein during secretion in one or more cleavage events. Such signal peptides contain processing sites that allow cleavage of the signal sequence from the mature proteins as they pass through the secretory pathway. Thus, the present invention pertains to the described polypeptides having a signal sequence, as well as to polypeptides from which the signal sequence has been proteolytically cleaved (i.e., the cleavage products). In one embodiment, a nucleic acid sequence encoding a signal sequence can be operably linked in an expression vector to a protein of interest, such as a protein which is ordinarily not secreted or is otherwise difficult to isolate. The signal sequence directs secretion of the protein, such as from a eukaryotic host into which the expression vector is transformed, and the signal sequence is subsequently or concurrently cleaved. The protein can then be readily purified from the extracellular medium by art recognized methods. Alternatively, the signal sequence can be linked to the protein of interest using a sequence which facilitates purification, such as with a GST domain.

[0301] The present invention also pertains to variants of the biomarker polypeptides described herein. Such variants have an altered amino acid sequence which can function as either agonists (mimetics) or as antagonists. Variants can be generated by mutagenesis, e.g., discrete point mutation or truncation. An agonist can retain substantially the same, or a subset, of the biological activities of the naturally occurring form of the protein. An antagonist of a protein can inhibit one or more of the activities of the naturally occurring form of the protein by, for example, competitively binding to a downstream or upstream member of a cellular signaling cascade which includes the protein of interest. Thus, specific biological effects can be elicited by treatment with a variant of limited function. Treatment of a subject with a variant having a subset of the biological activities of the naturally occurring form of the protein can have fewer side effects in a subject relative to treatment with the naturally occurring form of the protein.

[0302] Variants of a biomarker protein which function as either agonists (mimetics) or as antagonists can be identified by screening combinatorial libraries of mutants, e.g., truncation mutants, of the protein of the present invention for agonist or antagonist activity. In one embodiment, a variegated library of variants is generated by combinatorial mutagenesis at the nucleic acid level and is encoded by a variegated gene library. A variegated library of variants can be produced by, for example, enzymatically ligating a mixture of synthetic oligonucleotides into gene sequences such that a degenerate set of potential protein sequences is expressible as individual polypeptides, or alternatively, as a set of larger fusion proteins (e.g., for phage display). There are a variety of methods which can be used to produce libraries of potential variants of the polypeptides of the present invention from a degenerate oligonucleotide sequence. Methods for synthesizing degenerate oligonucleotides are known in the art (see, e.g., Narang (1983) Tetrahedron 39:3; Itakura et al. (1984) Annu. Rev. Biochem. 53:323; Itakura et al. (1984) Science 198:1056; Ike et al. (1983) Nucleic Acid Res. 11:477).

[0303] In addition, libraries of fragments of the coding sequence of a polypeptide corresponding to a marker of the present invention can be used to generate a variegated population of polypeptides for screening and subsequent selection of variants. For example, a library of coding sequence fragments can be generated by treating a double stranded PCR fragment of the coding sequence of interest with a nuclease under conditions wherein nicking occurs only about once per molecule, denaturing the double stranded DNA, renaturing the DNA to form double stranded DNA which can include sense/antisense pairs from different nicked products, removing single stranded portions from reformed duplexes by treatment with S1 nuclease, and ligating the resulting fragment library into an expression vector. By this method, an expression library can be derived which encodes amino terminal and internal fragments of various sizes of the protein of interest.

[0304] Several techniques are known in the art for screening gene products of combinatorial libraries made by point mutations or truncation, and for screening cDNA libraries for gene products having a selected property. The most widely used techniques, which are amenable to high throughput analysis, for screening large gene libraries typically include cloning the gene library into replicable expression vectors, transforming appropriate cells with the resulting library of vectors, and expressing the combinatorial genes under conditions in which detection of a desired activity facilitates isolation of the vector encoding the gene whose product was detected. Recursive ensemble mutagenesis (REM), a technique which enhances the frequency of functional mutants in the libraries, can be used in combination with the screening assays to identify variants of a protein of the present invention (Arkin and Yourvan (1992) Proc. Natl. Acad. Sci. USA 89:7811-7815; Delgrave et al. 91993) Protein Engineering 6(3):327-331).

[0305] The production and use of biomarker nucleic acid and/or biomarker polypeptide molecules described herein can be facilitated by using standard recombinant techniques. In some embodiments, such techniques use vectors, preferably expression vectors, containing a nucleic acid encoding a biomarker polypeptide or a portion of such a polypeptide. As used herein, the term “vector” refers to a nucleic acid molecule capable of transporting another nucleic acid to which it has been linked. One type of vector is a “plasmid”, which refers to a circular double stranded DNA loop into which additional DNA segments can be ligated. Another type of vector is a viral vector, wherein additional DNA segments can be ligated into the viral genome. Certain vectors are capable of autonomous replication in a host cell into which they are introduced (e.g., bacterial vectors having a bacterial origin of replication and episomal mammalian vectors). Other vectors (e.g., non-episomal mammalian vectors) are integrated into the genome of a host cell upon introduction into the host cell, and thereby are replicated along with the host genome. Moreover, certain vectors, namely expression vectors, are capable of directing the expression of genes to which they are operably linked. In general, expression vectors of utility in recombinant DNA techniques are often in the form of plasmids (vectors). However, the present invention is intended to include such other forms of expression vectors, such as viral vectors (e.g., replication defective retroviruses, adenoviruses and adeno-associated viruses), which serve equivalent functions.

[0306] The recombinant expression vectors of the present invention comprise a nucleic acid of the present invention in a form suitable for expression of the nucleic acid in a host cell. This means that the recombinant expression vectors include one or more regulatory sequences, selected on the basis of the host cells to be used for expression, which is operably linked to the nucleic acid sequence to be expressed. Within a recombinant expression vector, “operably linked” is intended to mean that the nucleotide sequence of interest is linked to the regulatory sequence(s) in a manner which allows for expression of the nucleotide sequence (e.g., in an in vitro transcription/translation system or in a host cell when the vector is introduced into the host cell). The term “regulatory sequence” is intended to include promoters, enhancers and other expression control elements (e.g., polyadenylation signals). Such regulatory sequences are described, for example, in Goeddel, Methods in Enzymology: Gene Expression Technology vol. 185, Academic Press, San Diego, CA (1991). Regulatory sequences include those which direct constitutive expression of a nucleotide sequence in many types of host cell and those which direct expression of the nucleotide sequence only in certain host cells (e.g., tissue-specific regulatory sequences). It will be appreciated by those skilled in the art that the design of the expression vector can depend on such factors as the choice of the host cell to be transformed, the level of expression of protein desired, and the like. The expression vectors of the present invention can be introduced into host cells to thereby produce proteins or peptides, including fusion proteins or peptides, encoded by nucleic acids as described herein.

[0307] The recombinant expression vectors for use in the present invention can be designed for expression of a polypeptide corresponding to a marker of the present invention in prokaryotic (e.g., E. coli) or eukaryotic cells (e.g., insect cells {using baculovirus expression vectors}, yeast cells or mammalian cells). Suitable host cells are discussed further in Goeddel, supra. Alternatively, the recombinant expression vector can be transcribed and translated in vitro, for example using T7 promoter regulatory sequences and T7 polymerase.

[0308] Expression of proteins in prokaryotes is most often carried out in E. coli with vectors containing constitutive or inducible promoters directing the expression of either fusion or non-fusion proteins. Fusion vectors add a number of amino acids to a protein encoded therein, usually to the amino terminus of the recombinant protein. Such fusion vectors typically serve three purposes: 1) to increase expression of recombinant protein; 2) to increase the solubility of the recombinant protein; and 3) to aid in the purification of the recombinant protein by acting as a ligand in affinity purification. Often, in fusion expression vectors, a proteolytic cleavage site is introduced at the junction of the fusion moiety and the recombinant protein to enable separation of the recombinant protein from the fusion moiety subsequent to purification of the fusion protein. Such enzymes, and their cognate recognition sequences, include Factor Xa, thrombin and enterokinase. Typical fusion expression vectors include pGEX (Pharmacia Biotech Inc; Smith and Johnson, 1988, Gene 67:31-40), pMAL (New England Biolabs, Beverly, MA) and pRIT5 (Pharmacia, Piscataway, NJ) which fuse glutathione S-transferase (GST), maltose E binding protein, or protein A, respectively, to the target recombinant protein.

[0309] Examples of suitable inducible non-fusion E. coli expression vectors include pTrc (Amann et al. (1988) Gene 69:301-315) and pET 11d (Studier et al., p. 60-89, In Gene Expression Technology: Methods in Enzymology vol. 185, Academic Press, San Diego, CA, 1991). Target biomarker nucleic acid expression from the pTrc vector relies on host RNA polymerase transcription from a hybrid trp-lac fusion promoter. Target biomarker nucleic acid expression from the pET 11d vector relies on transcription from a T7 gn10-lac fusion promoter mediated by a co-expressed viral RNA polymerase (T7 gn1). This viral polymerase is supplied by host strains BL21 (DE3) or HMS174(DE3) from a resident prophage harboring a T7 gn1 gene under the transcriptional control of the lacUV 5 promoter.

[0310] One strategy to maximize recombinant protein expression in E. coli is to express the protein in a host bacterium with an impaired capacity to proteolytically cleave the recombinant protein (Gottesman, p. 119-128, In Gene Expression Technology: Methods in Enzymology vol. 185, Academic Press, San Diego, CA, 1990. Another strategy is to alter the nucleic acid sequence of the nucleic acid to be inserted into an expression vector so that the individual codons for each amino acid are those preferentially utilized in E. coli (Wada et al., (1992) Nucleic Acids Res. 20:2111-2118). Such alteration of nucleic acid sequences of the present invention can be carried out by standard DNA synthesis techniques.

[0311] In another embodiment, the expression vector is a yeast expression vector. Examples of vectors for expression in yeast S. cerevisiae include pYepSec1 (Baldari et al. (1987) EMBO J. 6:229-234), pMFa (Kurjan and Herskowitz (1982) Cell 30:933-943), pJRY88 (Schultz et al. (1987) Gene 54:113-123), pYES2 (Invitrogen Corporation, San Diego, CA), and pPicZ (Invitrogen Corp, San Diego, CA).

[0312] Alternatively, the expression vector is a baculovirus expression vector. Baculovirus vectors available for expression of proteins in cultured insect cells (e.g., Sf 9 cells) include the pAc series (Smith et al. (1983) Mol. Cell Biol. 3:2156-2165) and the pVL series (Lucklow and Summers (1989) Virology 170:31-39).

[0313] In yet another embodiment, a nucleic acid of the present invention is expressed in mammalian cells using a mammalian expression vector. Examples of mammalian expression vectors include pCDM8 (Seed (1987) Nature 329:840) and pMT2PC (Kaufman et al. (1987) EMBO J. 6:187-195). When used in mammalian cells, the expression vector's control functions are often provided by viral regulatory elements. For example, commonly used promoters are derived from polyoma, Adenovirus 2, cytomegalovirus and Simian Virus 40. For other suitable expression systems for both prokaryotic and eukaryotic cells see chapters 16 and 17 of Sambrook et al., supra.

[0314] In another embodiment, the recombinant mammalian expression vector is capable of directing expression of the nucleic acid preferentially in a particular cell type (e.g., tissue-specific regulatory elements are used to express the nucleic acid). Tissue-specific regulatory elements are known in the art. Non-limiting examples of suitable tissue-specific promoters include the albumin promoter (liver-specific; Pinkert et al. (1987) Genes Dev. 1:268-277), lymphoid-specific promoters (Calame and Eaton (1988) Adv. Immunol. 43:235-275), in particular promoters of T cell receptors (Winoto and Baltimore (1989) EMBO J. 8:729-733) and immunoglobulins (Banerji et al. (1983) Cell 33:729-740; Queen and Baltimore (1983) Cell 33:741-748), neuron-specific promoters (e.g., the neurofilament promoter; Byrne and Ruddle (1989) Proc. Natl. Acad. Sci. USA 86:5473-5477), pancreas-specific promoters (Edlund et al. (1985) Science 230:912-916), and mammary gland-specific promoters (e.g., milk whey promoter; U.S. Pat. No. 4,873,316 and European Application Publication No. 264,166). Developmentally-regulated promoters are also encompassed, for example the murine hox promoters (Kessel and Gruss (1990) Science 249:374-379) and the a-fetoprotein promoter (Camper and Tilghman (1989) Genes Dev. 3:537-546).

[0315] The present invention further provides a recombinant expression vector comprising a DNA molecule cloned into the expression vector in an antisense orientation. That is, the DNA molecule is operably linked to a regulatory sequence in a manner which allows for expression (by transcription of the DNA molecule) of an RNA molecule which is antisense to the mRNA encoding a polypeptide of the present invention. Regulatory sequences operably linked to a nucleic acid cloned in the antisense orientation can be chosen which direct the continuous expression of the antisense RNA molecule in a variety of cell types, for instance viral promoters and/or enhancers, or regulatory sequences can be chosen which direct constitutive, tissue-specific or cell type specific expression of antisense RNA. The antisense expression vector can be in the form of a recombinant plasmid, phagemid, or attenuated virus in which antisense nucleic acids are produced under the control of a high efficiency regulatory region, the activity of which can be determined by the cell type into which the vector is introduced. For a discussion of the regulation of gene expression using antisense genes (see Weintraub et al. (1986) Trends in Genetics, Vol. 1(1)).

[0316] Another aspect of the present invention pertains to host cells into which a recombinant expression vector of the present invention has been introduced. The terms “host cell” and “recombinant host cell” are used interchangeably herein. It is understood that such terms refer not only to the particular subject cell but to the progeny or potential progeny of such a cell. Because certain modifications may occur in succeeding generations due to either mutation or environmental influences, such progeny may not, in fact, be identical to the parent cell, but are still included within the scope of the term as used herein.

[0317] A host cell can be any prokaryotic (e.g., E. coli) or eukaryotic cell (e.g., insect cells, yeast or mammalian cells).

[0318] Vector DNA can be introduced into prokaryotic or eukaryotic cells via conventional transformation or transfection techniques. As used herein, the terms “transformation” and “transfection” are intended to refer to a variety of art-recognized techniques for introducing foreign nucleic acid into a host cell, including calcium phosphate or calcium chloride co-precipitation, DEAE-dextran-mediated transfection, lipofection, or electroporation. Suitable methods for transforming or transfecting host cells can be found in Sambrook, et al. (supra), and other laboratory manuals.

[0319] For stable transfection of mammalian cells, it is known that, depending upon the expression vector and transfection technique used, only a small fraction of cells may integrate the foreign DNA into their genome. In order to identify and select these integrants, a gene that encodes a selectable marker (e.g., for resistance to antibiotics) is generally introduced into the host cells along with the gene of interest. Preferred selectable markers include those which confer resistance to drugs, such as G418, hygromycin and methotrexate. Cells stably transfected with the introduced nucleic acid can be identified by drug selection (e.g., cells that have incorporated the selectable marker gene will survive, while the other cells die).

### V. Analyzing Biomarker Nucleic Acids and Polypeptides

[0320] Biomarker nucleic acids and/or biomarker polypeptides can be analyzed according to the methods described herein and techniques known to the skilled artisan to identify such genetic or expression alterations useful for the present invention including, but not limited to, 1) an alteration in the level of a biomarker transcript or polypeptide, 2) a deletion or addition of one or more nucleotides from a biomarker gene, 4) a substitution of one or more nucleotides of a biomarker gene, 5) aberrant modification of a biomarker gene, such as an expression regulatory region, and the like.

a. Methods for Detection of Copy Number and/or Genomic Nucleic Acid Mutations

[0321] Methods of evaluating the copy number and/or genomic nucleic acid status (e.g., mutations) of a biomarker nucleic acid are well-known to those of skill in the art. The presence or absence of chromosomal gain or loss can be evaluated simply by a determination of copy number of the regions or markers identified herein.

[0322] In one embodiment, a biological sample is tested for the presence of copy number changes in genomic loci containing the genomic marker. A copy number of at least 3, 4, 5, 6, 7, 8, 9, or 10 of a biomarker is predictive of poorer outcome of treatment with the agent inhibiting binding of a SS18-SSX fusion protein to an H2A K119Ub-marked nucleosome.

[0323] Methods of evaluating the copy number of a biomarker locus include, but are not limited to, hybridization-based assays. Hybridization-based assays include, but are not limited to, traditional “direct probe” methods, such as Southern blots, in situ hybridization (e.g., FISH and FISH plus SKY) methods, and “comparative probe” methods, such as comparative genomic hybridization (CGH), e.g., cDNA-based or oligonucleotide-based CGH. The methods can be used in a wide variety of formats including, but not limited to, substrate (e.g. membrane or glass) bound methods or array-based approaches.

[0324] In one embodiment, evaluating the biomarker gene copy number in a sample involves a Southern Blot. In a Southern Blot, the genomic DNA (typically fragmented and separated on an electrophoretic gel) is hybridized to a probe specific for the target region. Comparison of the intensity of the hybridization signal from the probe for the target region with control probe signal from analysis of normal genomic DNA (e.g., a non-amplified portion of the same or related cell, tissue, organ, etc.) provides an estimate of the relative copy number of the target nucleic acid. Alternatively, a Northern blot may be utilized for evaluating the copy number of encoding nucleic acid in a sample. In a Northern blot, mRNA is hybridized to a probe specific for the target region. Comparison of the intensity of the hybridization signal from the probe for the target region with control probe signal from analysis of normal RNA (e.g., a non-amplified portion of the same or related cell, tissue, organ, etc.) provides an estimate of the relative copy number of the target nucleic acid. Alternatively, other methods well-known in the art to detect RNA can be used, such that higher or lower expression relative to an appropriate control (e.g., a non-amplified portion of the same or related cell tissue, organ, etc.) provides an estimate of the relative copy number of the target nucleic acid.

[0325] An alternative means for determining genomic copy number is in situ hybridization (e.g., Angerer (1987) Meth. Enzymol 152: 649). Generally, in situ hybridization comprises the following steps: (1) fixation of tissue or biological structure to be analyzed; (2) prehybridization treatment of the biological structure to increase accessibility of target DNA, and to reduce nonspecific binding; (3) hybridization of the mixture of nucleic acids to the nucleic acid in the biological structure or tissue; (4) post-hybridization washes to remove nucleic acid fragments not bound in the hybridization and (5) detection of the hybridized nucleic acid fragments. The reagent used in each of these steps and the conditions for use vary depending on the particular application. In a typical in situ hybridization assay, cells are fixed to a solid support, typically a glass slide. If a nucleic acid is to be probed, the cells are typically denatured with heat or alkali. The cells are then contacted with a hybridization solution at a moderate temperature to permit annealing of labeled probes specific to the nucleic acid sequence encoding the protein. The targets (e.g., cells) are then typically washed at a predetermined stringency or at an increasing stringency until an appropriate signal to noise ratio is obtained. The probes are typically labeled, e.g., with radioisotopes or fluorescent reporters. In one embodiment, probes are sufficiently long so as to specifically hybridize with the target nucleic acid(s) under stringent conditions. Probes generally range in length from about 200 bases to about 1000 bases. In some applications it is necessary to block the hybridization capacity of repetitive sequences. Thus, in some embodiments, tRNA, human genomic DNA, or Cot-I DNA is used to block non-specific hybridization.

[0326] An alternative means for determining genomic copy number is comparative genomic hybridization. In general, genomic DNA is isolated from normal reference cells, as well as from test cells (e.g., tumor cells) and amplified, if necessary. The two nucleic acids are differentially labeled and then hybridized in situ to metaphase chromosomes of a reference cell. The repetitive sequences in both the reference and test DNAs are either removed or their hybridization capacity is reduced by some means, for example by prehybridization with appropriate blocking nucleic acids and/or including such blocking nucleic acid sequences for said repetitive sequences during said hybridization. The bound, labeled DNA sequences are then rendered in a visualizable form, if necessary. Chromosomal regions in the test cells which are at increased or decreased copy number can be identified by detecting regions where the ratio of signal from the two DNAs is altered. For example, those regions that have decreased in copy number in the test cells will show relatively lower signal from the test DNA than the reference compared to other regions of the genome. Regions that have been increased in copy number in the test cells will show relatively higher signal from the test DNA. Where there are chromosomal deletions or multiplications, differences in the ratio of the signals from the two labels will be detected and the ratio will provide a measure of the copy number. In another embodiment of CGH, array CGH (aCGH), the immobilized chromosome element is replaced with a collection of solid support bound target nucleic acids on an array, allowing for a large or complete percentage of the genome to be represented in the collection of solid support bound targets. Target nucleic acids may comprise cDNAs, genomic DNAs, oligonucleotides (e.g., to detect single nucleotide polymorphisms) and the like. Array-based CGH may also be performed with single-color labeling (as opposed to labeling the control and the possible tumor sample with two different dyes and mixing them prior to hybridization, which will yield a ratio due to competitive hybridization of probes on the arrays). In single color CGH, the control is labeled and hybridized to one array and absolute signals are read, and the possible tumor sample is labeled and hybridized to a second array (with identical content) and absolute signals are read. Copy number difference is calculated based on absolute signals from the two arrays. Methods of preparing immobilized chromosomes or arrays and performing comparative genomic hybridization are well-known in the art (see, e.g., U.S. Pat. Nos. 6,335,167; 6,197,501; 5,830,645; and 5,665,549 and Albertson (1984) EMBO J. 3: 1227-1234; Pinkel (1988) Proc. Natl. Acad. Sci. USA 85: 9138-9142; EPO Pub. No. 430,402; Methods in Molecular Biology, Vol. 33: In situ Hybridization Protocols, Choo, ed., Humana Press, Totowa, N.J. (1994), etc.) In another embodiment, the hybridization protocol of Pinkel, et al. (1998) Nature Genetics 20: 207-211, or of Kallioniemi (1992) Proc. Natl Acad Sci USA 89:5321-5325 (1992) is used.

[0327] In still another embodiment, amplification-based assays can be used to measure copy number. In such amplification-based assays, the nucleic acid sequences act as a template in an amplification reaction (e.g., Polymerase Chain Reaction (PCR). In a quantitative amplification, the amount of amplification product will be proportional to the amount of template in the original sample. Comparison to appropriate controls, e.g. healthy tissue, provides a measure of the copy number.

[0328] Methods of “quantitative” amplification are well-known to those of skill in the art. For example, quantitative PCR involves simultaneously co-amplifying a known quantity of a control sequence using the same primers. This provides an internal standard that may be used to calibrate the PCR reaction. Detailed protocols for quantitative PCR are provided in Innis, et al. (1990) PCR Protocols, A Guide to Methods and Applications, Academic Press, Inc. N.Y.). Measurement of DNA copy number at microsatellite loci using quantitative PCR analysis is described in Ginzonger, et al. (2000) Cancer Research 60:5405-5409. The known nucleic acid sequence for the genes is sufficient to enable one of skill in the art to routinely select primers to amplify any portion of the gene. Fluorogenic quantitative PCR may also be used in the methods of the present invention. In fluorogenic quantitative PCR, quantitation is based on amount of fluorescence signals, e.g., TaqMan and SYBR green.

[0329] Other suitable amplification methods include, but are not limited to, ligase chain reaction (LCR) (see Wu and Wallace (1989) Genomics 4: 560, Landegren, et al. (1988) Science 241:1077, and Barringer et al. (1990) Gene 89: 117), transcription amplification (Kwoh, et al. (1989) Proc. Natl. Acad. Sci. USA 86: 1173), self-sustained sequence replication (Guatelli, et al. (1990) Proc. Nat. Acad. Sci. USA 87: 1874), dot PCR, and linker adapter PCR, etc.

[0330] Loss of heterozygosity (LOH) and major copy proportion (MCP) mapping (Wang, Z. C., et al. (2004) Cancer Res 64(1):64-71; Seymour, A. B., et al. (1994) Cancer Res 54, 2761-4; Hahn, S. A., et al. (1995) Cancer Res 55, 4670-5; Kimura, M., et al. (1996) Genes Chromosomes Cancer 17, 88-93; Li et al., (2008) MBC Bioinform. 9, 204-219) may also be used to identify regions of amplification or deletion.

b. Methods for Detection of Biomarker Nucleic Acid Expression

[0331] Biomarker expression may be assessed by any of a wide variety of well-known methods for detecting expression of a transcribed molecule or protein. Non-limiting examples of such methods include immunological methods for detection of secreted, cell-surface, cytoplasmic, or nuclear proteins, protein purification methods, protein function or activity assays, nucleic acid hybridization methods, nucleic acid reverse transcription methods, and nucleic acid amplification methods.

[0332] In preferred embodiments, activity of a particular gene is characterized by a measure of gene transcript (e.g. mRNA), by a measure of the quantity of translated protein, or by a measure of gene product activity. Marker expression can be monitored in a variety of ways, including by detecting mRNA levels, protein levels, or protein activity, any of which can be measured using standard techniques. Detection can involve quantification of the level of gene expression (e.g., genomic DNA, cDNA, mRNA, protein, or enzyme activity), or, alternatively, can be a qualitative assessment of the level of gene expression, in particular in comparison with a control level. The type of level being detected will be clear from the context.

[0333] In another embodiment, detecting or determining expression levels of a biomarker and functionally similar homologs thereof, including a fragment or genetic alteration thereof (e.g., in regulatory or promoter regions thereof) comprises detecting or determining RNA levels for the marker of interest. In one embodiment, one or more cells from the subject to be tested are obtained and RNA is isolated from the cells. In a preferred embodiment, a sample of breast tissue cells is obtained from the subject.

[0334] In one embodiment, RNA is obtained from a single cell. For example, a cell can be isolated from a tissue sample by laser capture microdissection (LCM). Using this technique, a cell can be isolated from a tissue section, including a stained tissue section, thereby assuring that the desired cell is isolated (see, e.g., Bonner et al. (1997) Science 278: 1481; Emmert-Buck et al. (1996) Science 274:998; Fend et al. (1999) Am. J. Path. 154: 61 and Murakami et al. (2000) Kidney Int. 58:1346). For example, Murakami et al., supra, describe isolation of a cell from a previously immunostained tissue section.

[0335] It is also be possible to obtain cells from a subject and culture the cells in vitro, such as to obtain a larger population of cells from which RNA can be extracted. Methods for establishing cultures of non-transformed cells, i.e., primary cell cultures, are known in the art.

[0336] When isolating RNA from tissue samples or cells from individuals, it may be important to prevent any further changes in gene expression after the tissue or cells has been removed from the subject. Changes in expression levels are known to change rapidly following perturbations, e.g., heat shock or activation with lipopolysaccharide (LPS) or other reagents. In addition, the RNA in the tissue and cells may quickly become degraded. Accordingly, in a preferred embodiment, the tissue or cells obtained from a subject is snap frozen as soon as possible.

[0337] RNA can be extracted from the tissue sample by a variety of methods, e.g., the guanidium thiocyanate lysis followed by CsCl centrifugation (Chirgwin et al., 1979, Biochemistry 18:5294-5299). RNA from single cells can be obtained as described in methods for preparing cDNA libraries from single cells, such as those described in Dulac, C. (1998) Curr. Top. Dev. Biol. 36, 245 and Jena et al. (1996) J. Immunol. Methods 190:199. Care to avoid RNA degradation must be taken, e.g., by inclusion of RNAsin.

[0338] The RNA sample can then be enriched in particular species. In one embodiment, poly(A)+ RNA is isolated from the RNA sample. In general, such purification takes advantage of the poly-A tails on mRNA. In particular and as noted above, poly-T oligonucleotides may be immobilized within on a solid support to serve as affinity ligands for mRNA. Kits for this purpose are commercially available, e.g., the MessageMaker kit (Life Technologies, Grand Island, NY).

[0339] In a preferred embodiment, the RNA population is enriched in marker sequences. Enrichment can be undertaken, e.g., by primer-specific cDNA synthesis, or multiple rounds of linear amplification based on cDNA synthesis and template-directed in vitro transcription (see, e.g., Wang et al. (1989) Proc. Natl. Acad. Sci. U.S.A. 86: 9717; Dulac et al., supra, and Jena et al., supra).

[0340] The population of RNA, enriched or not in particular species or sequences, can further be amplified. As defined herein, an “amplification process” is designed to strengthen, increase, or augment a molecule within the RNA. For example, where RNA is mRNA, an amplification process such as RT-PCR can be utilized to amplify the mRNA, such that a signal is detectable or detection is enhanced. Such an amplification process is beneficial particularly when the biological, tissue, or tumor sample is of a small size or volume.

[0341] Various amplification and detection methods can be used. For example, it is within the scope of the present invention to reverse transcribe mRNA into cDNA followed by polymerase chain reaction (RT-PCR); or, to use a single enzyme for both steps as described in U.S. Pat. No. 5,322,770, or reverse transcribe mRNA into cDNA followed by symmetric gap ligase chain reaction (RT-AGLCR) as described by R. L. Marshall, et al., PCR Methods and Applications 4: 80-84 (1994). Real time PCR may also be used.

[0342] Other known amplification methods which can be utilized herein include but are not limited to the so-called “NASBA” or “3SR” technique described in PNAS USA 87: 1874-1878 (1990) and also described in Nature 350 (No. 6313): 91-92 (1991); Q-beta amplification as described in published European Patent Application (EPA) No. 4544610; strand displacement amplification (as described in G. T. Walker et al., Clin. Chem. 42: 9-13 (1996) and European Patent Application No. 684315; target mediated amplification, as described by PCT Publication WO9322461; PCR; ligase chain reaction (LCR) (see, e.g., Wu and Wallace, Genomics 4, 560 (1989), Landegren et al., Science 241, 1077 (1988)); self-sustained sequence replication (SSR) (see, e.g., Guatelli et al., Proc. Nat. Acad. Sci. USA, 87, 1874 (1990)); and transcription amplification (see, e.g., Kwoh et al., Proc. Natl. Acad. Sci. USA 86, 1173 (1989)).

[0343] Many techniques are known in the state of the art for determining absolute and relative levels of gene expression, commonly used techniques suitable for use in the present invention include Northern analysis, RNase protection assays (RPA), microarrays and PCR-based techniques, such as quantitative PCR and differential display PCR. For example, Northern blotting involves running a preparation of RNA on a denaturing agarose gel, and transferring it to a suitable support, such as activated cellulose, nitrocellulose or glass or nylon membranes. Radiolabeled cDNA or RNA is then hybridized to the preparation, washed and analyzed by autoradiography.

[0344] In situ hybridization visualization may also be employed, wherein a radioactively labeled antisense RNA probe is hybridized with a thin section of a biopsy sample, washed, cleaved with RNase and exposed to a sensitive emulsion for autoradiography. The samples may be stained with hematoxylin to demonstrate the histological composition of the sample, and dark field imaging with a suitable light filter shows the developed emulsion.

[0345] Non-radioactive labels such as digoxigenin may also be used.

[0346] Alternatively, mRNA expression can be detected on a DNA array, chip or a microarray. Labeled nucleic acids of a test sample obtained from a subject may be hybridized to a solid surface comprising biomarker DNA. Positive hybridization signal is obtained with the sample containing biomarker transcripts. Methods of preparing DNA arrays and their use are well-known in the art (see, e.g., U.S. Pat. Nos: 6,618,6796; 6,379,897; 6,664,377; 6,451,536; 548,257; U.S. 20030157485 and Schena et al. (1995) Science 20, 467-470; Gerhold et al. (1999) Trends In Biochem. Sci. 24, 168-173; and Lennon et al. (2000) Drug Discovery Today 5, 59-65, which are herein incorporated by reference in their entirety). Serial Analysis of Gene Expression (SAGE) can also be performed (See for example U.S. Patent Application 20030215858).

[0347] To monitor mRNA levels, for example, mRNA is extracted from the biological sample to be tested, reverse transcribed, and fluorescently-labeled cDNA probes are generated. The microarrays capable of hybridizing to marker cDNA are then probed with the labeled cDNA probes, the slides scanned and fluorescence intensity measured. This intensity correlates with the hybridization intensity and expression levels.

[0348] Types of probes that can be used in the methods described herein include cDNA, riboprobes, synthetic oligonucleotides and genomic probes. The type of probe used will generally be dictated by the particular situation, such as riboprobes for in situ hybridization, and cDNA for Northern blotting, for example. In one embodiment, the probe is directed to nucleotide regions unique to the RNA. The probes may be as short as is required to differentially recognize marker mRNA transcripts, and may be as short as, for example, 15 bases; however, probes of at least 17, 18, 19 or 20 or more bases can be used. In one embodiment, the primers and probes hybridize specifically under stringent conditions to a DNA fragment having the nucleotide sequence corresponding to the marker. As herein used, the term “stringent conditions” means hybridization will occur only if there is at least 95% identity in nucleotide sequences. In another embodiment, hybridization under “stringent conditions” occurs when there is at least 97% identity between the sequences.

[0349] The form of labeling of the probes may be any that is appropriate, such as the use of radioisotopes, for example, ³²P and ³⁵S. Labeling with radioisotopes may be achieved, whether the probe is synthesized chemically or biologically, by the use of suitably labeled bases.

[0350] In one embodiment, the biological sample contains polypeptide molecules from the test subject. Alternatively, the biological sample can contain mRNA molecules from the test subject or genomic DNA molecules from the test subject.

[0351] In another embodiment, the methods further involve obtaining a control biological sample from a control subject, contacting the control sample with a compound or agent capable of detecting marker polypeptide, mRNA, genomic DNA, or fragments thereof, such that the presence of the marker polypeptide, mRNA, genomic DNA, or fragments thereof, is detected in the biological sample, and comparing the presence of the marker polypeptide, mRNA, genomic DNA, or fragments thereof, in the control sample with the presence of the marker polypeptide, mRNA, genomic DNA, or fragments thereof in the test sample.

c. Methods for Detection of Biomarker Protein Expression

[0352] The activity or level of a biomarker protein can be detected and/or quantified by detecting or quantifying the expressed polypeptide. The polypeptide can be detected and quantified by any of a number of means well-known to those of skill in the art. Aberrant levels of polypeptide expression of the polypeptides encoded by a biomarker nucleic acid and functionally similar homologs thereof, including a fragment or genetic alteration thereof (e.g., in regulatory or promoter regions thereof) are associated with the likelihood of response of a cancer to a modulator of T cell mediated cytotoxicity alone or in combination with an immunotherapy treatment. Any method known in the art for detecting polypeptides can be used. Such methods include, but are not limited to, immunodiffusion, immunoelectrophoresis, radioimmunoassay (RIA), enzyme-linked immunosorbent assays (ELISAs), immunofluorescent assays, Western blotting, binder-ligand assays, immunohistochemical techniques, agglutination, complement assays, high performance liquid chromatography (HPLC), thin layer chromatography (TLC), hyperdiffusion chromatography, and the like (e.g., Basic and Clinical Immunology, Sites and Terr, eds., Appleton and Lange, Norwalk, Conn. pp 217-262, 1991 which is incorporated by reference). Preferred are binder-ligand immunoassay methods including reacting antibodies with an epitope or epitopes and competitively displacing a labeled polypeptide or derivative thereof.

[0353] For example, ELISA and RIA procedures may be conducted such that a desired biomarker protein standard is labeled (with a radioisotope such as ¹²⁵I or ³⁵S, or an assayable enzyme, such as horseradish peroxidase or alkaline phosphatase), and, together with the unlabeled sample, brought into contact with the corresponding antibody, whereon a second antibody is used to bind the first, and radioactivity or the immobilized enzyme assayed (competitive assay). Alternatively, the biomarker protein in the sample is allowed to react with the corresponding immobilized antibody, radioisotope- or enzyme-labeled anti-biomarker protein antibody is allowed to react with the system, and radioactivity or the enzyme assayed (ELISA-sandwich assay). Other conventional methods may also be employed as suitable.

[0354] The above techniques may be conducted essentially as a “one-step” or “two-step” assay. A “one-step” assay involves contacting antigen with immobilized antibody and, without washing, contacting the mixture with labeled antibody. A “two-step” assay involves washing before contacting, the mixture with labeled antibody. Other conventional methods may also be employed as suitable.

[0355] In one embodiment, a method for measuring biomarker protein levels comprises the steps of: contacting a biological specimen with an antibody or variant (e.g., fragment) thereof which selectively binds the biomarker protein, and detecting whether said antibody or variant thereof is bound to said sample and thereby measuring the levels of the biomarker protein.

[0356] Enzymatic and radiolabeling of biomarker protein and/or the antibodies may be effected by conventional means. Such means will generally include covalent linking of the enzyme to the antigen or the antibody in question, such as by glutaraldehyde, specifically so as not to adversely affect the activity of the enzyme, by which is meant that the enzyme must still be capable of interacting with its substrate, although it is not necessary for all of the enzyme to be active, provided that enough remains active to permit the assay to be effected. Indeed, some techniques for binding enzyme are non-specific (such as using formaldehyde), and will only yield a proportion of active enzyme.

[0357] It is usually desirable to immobilize one component of the assay system on a support, thereby allowing other components of the system to be brought into contact with the component and readily removed without laborious and time-consuming labor. It is possible for a second phase to be immobilized away from the first, but one phase is usually sufficient.

[0358] It is possible to immobilize the enzyme itself on a support, but if solid-phase enzyme is required, then this is generally best achieved by binding to antibody and affixing the antibody to a support, models and systems for which are well-known in the art. Simple polyethylene may provide a suitable support.

[0359] Enzymes employable for labeling are not particularly limited, but may be selected from the members of the oxidase group, for example. These catalyze production of hydrogen peroxide by reaction with their substrates, and glucose oxidase is often used for its good stability, ease of availability and cheapness, as well as the ready availability of its substrate (glucose). Activity of the oxidase may be assayed by measuring the concentration of hydrogen peroxide formed after reaction of the enzyme-labeled antibody with the substrate under controlled conditions well-known in the art.

[0360] Other techniques may be used to detect biomarker protein according to a practitioner's preference based upon the present disclosure. One such technique is Western blotting (Towbin et at., Proc. Nat. Acad. Sci. 76:4350 (1979)), wherein a suitably treated sample is run on an SDS-PAGE gel before being transferred to a solid support, such as a nitrocellulose filter. Anti-biomarker protein antibodies (unlabeled) are then brought into contact with the support and assayed by a secondary immunological reagent, such as labeled protein A or anti-immunoglobulin (suitable labels including ¹²⁵I, horseradish peroxidase and alkaline phosphatase). Chromatographic detection may also be used.

[0361] Immunohistochemistry may be used to detect expression of biomarker protein, e.g., in a biopsy sample. A suitable antibody is brought into contact with, for example, a thin layer of cells, washed, and then contacted with a second, labeled antibody. Labeling may be by fluorescent markers, enzymes, such as peroxidase, avidin, or radiolabeling. The assay is scored visually, using microscopy.

[0362] Anti-biomarker protein antibodies, such as intrabodies, may also be used for imaging purposes, for example, to detect the presence of biomarker protein in cells and tissues of a subject. Suitable labels include radioisotopes, iodine (¹²⁵I, ¹²¹I), carbon (¹⁴C), sulphur (³⁵S), tritium (³H), indium (^{I12}In), and technetium (⁹⁹mTc), fluorescent labels, such as fluorescein and rhodamine, and biotin.

[0363] For in vivo imaging purposes, antibodies are not detectable, as such, from outside the body, and so must be labeled, or otherwise modified, to permit detection. Markers for this purpose may be any that do not substantially interfere with the antibody binding, but which allow external detection. Suitable markers may include those that may be detected by X-radiography, NMR or MRI. For X-radiographic techniques, suitable markers include any radioisotope that emits detectable radiation but that is not overtly harmful to the subject, such as barium or cesium, for example. Suitable markers for NMR and MRI generally include those with a detectable characteristic spin, such as deuterium, which may be incorporated into the antibody by suitable labeling of nutrients for the relevant hybridoma, for example.

[0364] The size of the subject, and the imaging system used, will determine the quantity of imaging moiety needed to produce diagnostic images. In the case of a radioisotope moiety, for a human subject, the quantity of radioactivity injected will normally range from about 5 to 20 millicuries of technetium-99. The labeled antibody or antibody fragment will then preferentially accumulate at the location of cells which contain biomarker protein. The labeled antibody or antibody fragment can then be detected using known techniques.

[0365] Antibodies that may be used to detect biomarker protein include any antibody, whether natural or synthetic, full length or a fragment thereof, monoclonal or polyclonal, that binds sufficiently strongly and specifically to the biomarker protein to be detected. An antibody may have a Ka of at most about 10⁻⁶M, 10⁻⁷M, 10⁻⁸M, 10⁻⁹M, 10⁻¹⁰M, 10⁻¹¹ M, 10⁻¹²M. The phrase “specifically binds” refers to binding of, for example, an antibody to an epitope or antigen or antigenic determinant in such a manner that binding can be displaced or competed with a second preparation of identical or similar epitope, antigen or antigenic determinant. An antibody may bind preferentially to the biomarker protein relative to other proteins, such as related proteins.

[0366] Antibodies are commercially available or may be prepared according to methods known in the art.

[0367] Antibodies and derivatives thereof that may be used encompass polyclonal or monoclonal antibodies, chimeric, human, humanized, primatized (CDR-grafted), veneered or single-chain antibodies as well as functional fragments, i.e., biomarker protein binding fragments, of antibodies. For example, antibody fragments capable of binding to a biomarker protein or portions thereof, including, but not limited to, Fv, Fab, Fab′ and F(ab′) 2 fragments can be used. Such fragments can be produced by enzymatic cleavage or by recombinant techniques. For example, papain or pepsin cleavage can generate Fab or F(ab′) 2 fragments, respectively. Other proteases with the requisite substrate specificity can also be used to generate Fab or F(ab′) 2 fragments. Antibodies can also be produced in a variety of truncated forms using antibody genes in which one or more stop codons have been introduced upstream of the natural stop site. For example, a chimeric gene encoding a F(ab′) 2 heavy chain portion can be designed to include DNA sequences encoding the CH, domain and hinge region of the heavy chain.

[0368] Synthetic and engineered antibodies are described in, e.g., Cabilly et al., U.S. Pat. No. 4,816,567 Cabilly et al., European Patent No. 0,125,023 B1; Boss et al., U.S. Pat. No. 4,816,397; Boss et al., European Patent No. 0,120,694 B1; Neuberger, M. S. et al., WO 86/01533; Neuberger, M. S. et al., European Patent No. 0,194,276 B1; Winter, U.S. Pat. No. 5,225,539; Winter, European Patent No. 0,239,400 B1; Queen et al., European Patent No. 0451216 B1; and Padlan, E. A. et al., EP 0519596 A1. See also, Newman, R. et al., BioTechnology, 10: 1455-1460 (1992), regarding primatized antibody, and Ladner et al., U.S. Pat. No. 4,946,778 and Bird, R. E. et al., Science, 242: 423-426 (1988)) regarding single-chain antibodies. Antibodies produced from a library, e.g., phage display library, may also be used.

[0369] In some embodiments, agents that specifically bind to a biomarker protein other than antibodies are used, such as peptides. Peptides that specifically bind to a biomarker protein can be identified by any means known in the art. For example, specific peptide binders of a biomarker protein can be screened for using peptide phage display libraries.

d. Methods for Detection of Biomarker Structural Alterations

[0370] The following illustrative methods can be used to identify the presence of a structural alteration in a biomarker nucleic acid and/or biomarker polypeptide molecule in order to, for example, identify the SS18-SSX fusion protein/H2A K119Ub nucleosomes pathway proteins that are overexpressed, overfunctional, and the like.

[0371] In certain embodiments, detection of the alteration involves the use of a probe/primer in a polymerase chain reaction (PCR) (see, e.g., U.S. Pat. Nos. 4,683,195 and 4,683,202), such as anchor PCR or RACE PCR, or, alternatively, in a ligation chain reaction (LCR) (see, e.g., Landegran et al. (1988) Science 241:1077-1080; and Nakazawa et al. (1994) Proc. Natl. Acad. Sci. USA 91:360-364), the latter of which can be particularly useful for detecting point mutations in a biomarker nucleic acid such as a biomarker gene (see Abravaya et al. (1995) Nucleic Acids Res. 23:675-682). This method can include the steps of collecting a sample of cells from a subject, isolating nucleic acid (e.g., genomic, mRNA or both) from the cells of the sample, contacting the nucleic acid sample with one or more primers which specifically hybridize to a biomarker gene under conditions such that hybridization and amplification of the biomarker gene (if present) occurs, and detecting the presence or absence of an amplification product, or detecting the size of the amplification product and comparing the length to a control sample. It is anticipated that PCR and/or LCR may be desirable to use as a preliminary amplification step in conjunction with any of the techniques used for detecting mutations described herein.

[0372] Alternative amplification methods include: self-sustained sequence replication (Guatelli, J. C. et al. (1990) Proc. Natl. Acad. Sci. USA 87:1874-1878), transcriptional amplification system (Kwoh, D. Y. et al. (1989) Proc. Natl. Acad. Sci. USA 86:1173-1177), Q-Beta Replicase (Lizardi, P. M. et al. (1988) Bio-Technology 6:1197), or any other nucleic acid amplification method, followed by the detection of the amplified molecules using techniques well-known to those of skill in the art. These detection schemes are especially useful for the detection of nucleic acid molecules if such molecules are present in very low numbers.

[0373] In an alternative embodiment, mutations in a biomarker nucleic acid from a sample cell can be identified by alterations in restriction enzyme cleavage patterns. For example, sample and control DNA is isolated, amplified (optionally), digested with one or more restriction endonucleases, and fragment length sizes are determined by gel electrophoresis and compared. Differences in fragment length sizes between sample and control DNA indicates mutations in the sample DNA. Moreover, the use of sequence specific ribozymes (see, for example, U.S. Pat. No. 5,498,531) can be used to score for the presence of specific mutations by development or loss of a ribozyme cleavage site.

[0374] In other embodiments, genetic mutations in biomarker nucleic acid can be identified by hybridizing a sample and control nucleic acids, e.g., DNA or RNA, to high density arrays containing hundreds or thousands of oligonucleotide probes (Cronin, M. T. et al. (1996) Hum. Mutat. 7:244-255; Kozal, M. J. et al. (1996) Nat. Med. 2:753-759). For example, biomarker genetic mutations can be identified in two dimensional arrays containing light-generated DNA probes as described in Cronin et al. (1996) supra. Briefly, a first hybridization array of probes can be used to scan through long stretches of DNA in a sample and control to identify base changes between the sequences by making linear arrays of sequential, overlapping probes. This step allows the identification of point mutations. This step is followed by a second hybridization array that allows the characterization of specific mutations by using smaller, specialized probe arrays complementary to all variants or mutations detected. Each mutation array is composed of parallel probe sets, one complementary to the wild-type gene and the other complementary to the mutant gene.

[0375] Such biomarker genetic mutations can be identified in a variety of contexts, including, for example, germline and somatic mutations.

[0376] In yet another embodiment, any of a variety of sequencing reactions known in the art can be used to directly sequence a biomarker gene and detect mutations by comparing the sequence of the sample biomarker with the corresponding wild-type (control) sequence. Examples of sequencing reactions include those based on techniques developed by Maxam and Gilbert (1977) Proc. Natl. Acad. Sci. USA 74:560 or Sanger (1977) Proc. Natl. Acad Sci. USA 74:5463. It is also contemplated that any of a variety of automated sequencing procedures can be utilized when performing the diagnostic assays (Naeve (1995) Biotechniques 19:448-53), including sequencing by mass spectrometry (see, e.g., PCT International Publication No. WO 94/16101; Cohen et al. (1996) Adv. Chromatogr. 36:127-162; and Griffin et al. (1993) Appl. Biochem. Biotechnol. 38:147-159).

[0377] Other methods for detecting mutations in a biomarker gene include methods in which protection from cleavage agents is used to detect mismatched bases in RNA/RNA or RNA/DNA heteroduplexes (Myers et al. (1985) Science 230:1242). In general, the art technique of “mismatch cleavage” starts by providing heteroduplexes formed by hybridizing (labeled) RNA or DNA containing the wild-type biomarker sequence with potentially mutant RNA or DNA obtained from a tissue sample. The double-stranded duplexes are treated with an agent which cleaves single-stranded regions of the duplex such as which will exist due to base pair mismatches between the control and sample strands. For instance, RNA/DNA duplexes can be treated with RNase and DNA/DNA hybrids treated with SI nuclease to enzymatically digest the mismatched regions. In other embodiments, either DNA/DNA or RNA/DNA duplexes can be treated with hydroxylamine or osmium tetroxide and with piperidine in order to digest mismatched regions. After digestion of the mismatched regions, the resulting material is then separated by size on denaturing polyacrylamide gels to determine the site of mutation. See, for example, Cotton et al. (1988) Proc. Natl. Acad. Sci. USA 85:4397 and Saleeba et al. (1992) Methods Enzymol. 217:286-295. In a preferred embodiment, the control DNA or RNA can be labeled for detection.

[0378] In still another embodiment, the mismatch cleavage reaction employs one or more proteins that recognize mismatched base pairs in double-stranded DNA (so called “DNA mismatch repair” enzymes) in defined systems for detecting and mapping point mutations in biomarker cDNAs obtained from samples of cells. For example, the mutY enzyme of E. coli cleaves A at G/A mismatches and the thymidine DNA glycosylase from HeLa cells cleaves T at G/T mismatches (Hsu et al. (1994) Carcinogenesis 15:1657-1662). According to an exemplary embodiment, a probe based on a biomarker sequence, e.g., a wild-type biomarker treated with a DNA mismatch repair enzyme, and the cleavage products, if any, can be detected from electrophoresis protocols or the like (e.g., U.S. Pat. No. 5,459,039.)

[0379] In other embodiments, alterations in electrophoretic mobility can be used to identify mutations in biomarker genes. For example, single strand conformation polymorphism (SSCP) may be used to detect differences in electrophoretic mobility between mutant and wild type nucleic acids (Orita et al. (1989) Proc Natl. Acad. Sci USA 86:2766; see also Cotton (1993) Mutat. Res. 285:125-144 and Hayashi (1992) Genet. Anal. Tech. Appl. 9:73-79). Single-stranded DNA fragments of sample and control biomarker nucleic acids will be denatured and allowed to renature. The secondary structure of single-stranded nucleic acids varies according to sequence, the resulting alteration in electrophoretic mobility enables the detection of even a single base change. The DNA fragments may be labeled or detected with labeled probes. The sensitivity of the assay may be enhanced by using RNA (rather than DNA), in which the secondary structure is more sensitive to a change in sequence. In a preferred embodiment, the subject method utilizes heteroduplex analysis to separate double stranded heteroduplex molecules on the basis of changes in electrophoretic mobility (Keen et al. (1991) Trends Genet. 7:5).

[0380] In yet another embodiment the movement of mutant or wild-type fragments in polyacrylamide gels containing a gradient of denaturant is assayed using denaturing gradient gel electrophoresis (DGGE) (Myers et al. (1985) Nature 313:495). When DGGE is used as the method of analysis, DNA will be modified to ensure that it does not completely denature, for example by adding a GC clamp of approximately 40 bp of high-melting GC-rich DNA by PCR. In a further embodiment, a temperature gradient is used in place of a denaturing gradient to identify differences in the mobility of control and sample DNA (Rosenbaum and Reissner (1987) Biophys. Chem. 265:12753).

[0381] Examples of other techniques for detecting point mutations include, but are not limited to, selective oligonucleotide hybridization, selective amplification, or selective primer extension. For example, oligonucleotide primers may be prepared in which the known mutation is placed centrally and then hybridized to target DNA under conditions which permit hybridization only if a perfect match is found (Saiki et al. (1986) Nature 324:163; Saiki et al. (1989) Proc. Natl. Acad. Sci. USA 86:6230). Such allele specific oligonucleotides are hybridized to PCR amplified target DNA or a number of different mutations when the oligonucleotides are attached to the hybridizing membrane and hybridized with labeled target DNA.

[0382] Alternatively, allele specific amplification technology which depends on selective PCR amplification may be used in conjunction with the instant invention. Oligonucleotides used as primers for specific amplification may carry the mutation of interest in the center of the molecule (so that amplification depends on differential hybridization) (Gibbs et al. (1989) Nucleic Acids Res. 17:2437-2448) or at the extreme 3′ end of one primer where, under appropriate conditions, mismatch can prevent, or reduce polymerase extension (Prossner (1993) Tibtech 11:238). In addition it may be desirable to introduce a novel restriction site in the region of the mutation to create cleavage-based detection (Gasparini et al. (1992) Mol. Cell Probes 6:1). It is anticipated that in certain embodiments amplification may also be performed using Taq ligase for amplification (Barany (1991) Proc. Natl. Acad. Sci USA 88:189). In such cases, ligation will occur only if there is a perfect match at the 3′ end of the 5′ sequence making it possible to detect the presence of a known mutation at a specific site by looking for the presence or absence of amplification.

### VI. Cancer Therapies

[0383] The efficacy of a cancer therapy with an agent that inhibits binding of a SS18-SSX fusion protein to an H2A K119Ub-marked nucleosome is predicted according to biomarker presence, absence, amount and/or activity associated with a cancer in a subject according to the methods described herein. In one embodiment, such cancer therapy (e.g., an agent inhibiting binding of a SS18-SSX fusion protein to an H2A K119Ub-marked nucleosome) or combinations of therapies (e.g., an agent inhibiting binding of a SS18-SSX fusion protein to an H2A K119Ub-marked nucleosome, in combination with at least one immunotherapy) can be administered to a desired subject or once a subject is indicated as being a likely responder to cancer therapy (e.g., an agent inhibiting binding of a SS18-SSX fusion protein to an H2A K119Ub-marked nucleosome). In another embodiment, such cancer therapy (e.g., an agent inhibiting binding of a SS18-SSX fusion protein to an H2A K119Ub-marked nucleosome) can be avoided once a subject is indicated as not being a likely responder to the cancer therapy (e.g., an agent inhibiting binding of a SS18-SSX fusion protein to an H2A K119Ub-marked nucleosome) and an alternative treatment regimen, such as targeted and/or untargeted cancer therapies can be administered. Combination therapies are also contemplated and can comprise, for example, one or more chemotherapeutic agents and radiation, one or more chemotherapeutic agents and immunotherapy, or one or more chemotherapeutic agents, radiation and chemotherapy, each combination of which can be with or without the agent inhibiting binding of a SS18-SSX fusion protein to an H2A K119Ub-marked nucleosome.

[0384] The term “targeted therapy” refers to administration of agents that selectively interact with a chosen biomolecule to thereby treat cancer. One example includes administration of an agent that inhibits binding of a SS18-SSX fusion protein to an H2A K119Ub-marked nucleosome. These agents block or otherwise reduce the interaction between a SS18-SSX fusion protein to an H2A K119Ub-marked nucleosome such that the activation of the SS18-SSX fusion protein target genes otherwise induced by the interaction is blocked or otherwise reduced. These agents may inhibit binding of a SS18-SSX fusion protein to an H2A K119Ub-marked nucleosome in a direct or indirect way.

[0385] Targeted therapy regarding the inhibition of immune checkpoint inhibitor is useful in combination with the methods of the present invention. The term “immune checkpoint inhibitor” means a group of molecules on the cell surface of CD4+ and/or CD8+ T cells that fine-tune immune responses by down-modulating or inhibiting an anti-tumor immune response. Immune checkpoint proteins are well-known in the art and include, without limitation, CTLA-4, PD-1, VISTA, B7-H2, B7-H3, PD-L1, B7-H4, B7-H6, 2B4, ICOS, HVEM, PD-L2, CD160, gp49B, PIR-B, KIR family receptors, TIM-1, TIM-3, TIM-4, LAG-3, BTLA, SIRPalpha (CD47), CD48, 2B4 (CD244), B7.1, B7.2, ILT-2, ILT-4, TIGIT, and A2aR (see, for example, WO 2012/177624). Inhibition of one or more immune checkpoint inhibitors can block or otherwise neutralize inhibitory signaling to thereby upregulate an immune response in order to more efficaciously treat cancer.

[0386] Immunotherapy is one form of targeted therapy that may comprise, for example, the use of cancer vaccines and/or sensitized antigen presenting cells. For example, an oncolytic virus is a virus that is able to infect and lyse cancer cells, while leaving normal cells unharmed, making them potentially useful in cancer therapy. Replication of oncolytic viruses both facilitates tumor cell destruction and also produces dose amplification at the tumor site. They may also act as vectors for anticancer genes, allowing them to be specifically delivered to the tumor site. The immunotherapy can involve passive immunity for short-term protection of a host, achieved by the administration of pre-formed antibody directed against a cancer antigen or disease antigen (e.g., administration of a monoclonal antibody, optionally linked to a chemotherapeutic agent or toxin, to a tumor antigen). For example, anti-VEGF and mTOR inhibitors are known to be effective in treating renal cell carcinoma. Immunotherapy can also focus on using the cytotoxic lymphocyte-recognized epitopes of cancer cell lines. Alternatively, antisense polynucleotides, ribozymes, RNA interference molecules, triple helix polynucleotides and the like, can be used to selectively modulate biomolecules that are linked to the initiation, progression, and/or pathology of a tumor or cancer.

[0387] Similarly, agents and therapies other than immunotherapy or in combination thereof can be used with in combination with agents inhibiting binding of a SS18-SSX fusion protein to an H2A K119Ub-marked nucleosome to treat a cancer that would benefit therefrom. For example, chemotherapy, radiation, epigenetic modifiers (e.g., histone deacetylase (HDAC) modifiers, methylation modifiers, phosphorylation modifiers, and the like), targeted therapy, and the like are well-known in the art.

[0388] The term “untargeted therapy” refers to administration of agents that do not selectively interact with a chosen biomolecule yet treat cancer. Representative examples of untargeted therapies include, without limitation, chemotherapy, gene therapy, and radiation therapy.

[0389] In one embodiment, chemotherapy is used. Chemotherapy includes the administration of a chemotherapeutic agent. Such a chemotherapeutic agent may be, but is not limited to, those selected from among the following groups of compounds: platinum compounds, cytotoxic antibiotics, antimetabolities, anti-mitotic agents, alkylating agents, arsenic compounds, DNA topoisomerase inhibitors, taxanes, nucleoside analogues, plant alkaloids, and toxins; and synthetic derivatives thereof. Exemplary compounds include, but are not limited to, alkylating agents: cisplatin, treosulfan, and trofosfamide; plant alkaloids: vinblastine, paclitaxel, docetaxol; DNA topoisomerase inhibitors: teniposide, crisnatol, and mitomycin; anti-folates: methotrexate, mycophenolic acid, and hydroxyurea; pyrimidine analogs: 5-fluorouracil, doxifluridine, and cytosine arabinoside; purine analogs: mercaptopurine and thioguanine; DNA antimetabolites: 2′-deoxy-5-fluorouridine, aphidicolin glycinate, and pyrazoloimidazole; and antimitotic agents: halichondrin, colchicine, and rhizoxin. Compositions comprising one or more chemotherapeutic agents (e.g., FLAG, CHOP) may also be used. FLAG comprises fludarabine, cytosine arabinoside (Ara-C) and G-CSF. CHOP comprises cyclophosphamide, vincristine, doxorubicin, and prednisone. In another embodiment, PARP (e.g., PARP-1 and/or PARP-2) inhibitors are used and such inhibitors are well-known in the art (e.g., Olaparib, ABT-888, BSI-201, BGP-15 (N-Gene Research Laboratories, Inc.); INO-1001 (Inotek Pharmaceuticals Inc.); PJ34 (Soriano et al., 2001; Pacher et al., 2002b); 3-aminobenzamide (Trevigen); 4-amino-1,8-naphthalimide; (Trevigen); 6(5H)-phenanthridinone (Trevigen); benzamide (U.S. Pat. No. Re. 36,397); and NU1025 (Bowman et al.). The mechanism of action is generally related to the ability of PARP inhibitors to bind PARP and decrease its activity. PARP catalyzes the conversion of .beta.-nicotinamide adenine dinucleotide (NAD+) into nicotinamide and poly-ADP-ribose (PAR). Both poly (ADP-ribose) and PARP have been linked to regulation of transcription, cell proliferation, genomic stability, and carcinogenesis (Bouchard V. J. et. al. Experimental Hematology, Volume 31, Number 6, June 2003, pp. 446-454(9); Herceg Z.; Wang Z.-Q. Mutation Research/Fundamental and Molecular Mechanisms of Mutagenesis, Volume 477, Number 1, 2 Jun. 2001, pp. 97-110(14)). Poly(ADP-ribose) polymerase 1 (PARP1) is a key molecule in the repair of DNA single-strand breaks (SSBs) (de Murcia J. et al. 1997. Proc Natl Acad Sci USA 94:7303-7307; Schreiber V, Dantzer F, Ame J C, de Murcia G (2006) Nat Rev Mol Cell Biol 7:517-528; Wang Z Q, et al. (1997) Genes Dev 11:2347-2358). Knockout of SSB repair by inhibition of PARP1 function induces DNA double-strand breaks (DSBs) that can trigger synthetic lethality in cancer cells with defective homology-directed DSB repair (Bryant H E, et al. (2005) Nature 434:913-917; Farmer H, et al. (2005) Nature 434:917-921). The foregoing examples of chemotherapeutic agents are illustrative, and are not intended to be limiting.

[0390] In another embodiment, radiation therapy is used. The radiation used in radiation therapy can be ionizing radiation. Radiation therapy can also be gamma rays, X-rays, or proton beams. Examples of radiation therapy include, but are not limited to, external-beam radiation therapy, interstitial implantation of radioisotopes (I-125, palladium, iridium), radioisotopes such as strontium-89, thoracic radiation therapy, intraperitoneal P-32 radiation therapy, and/or total abdominal and pelvic radiation therapy. For a general overview of radiation therapy, see Hellman, Chapter 16: Principles of Cancer Management: Radiation Therapy, 6th edition, 2001, DeVita et al., eds., J. B. Lippencott Company, Philadelphia. The radiation therapy can be administered as external beam radiation or teletherapy wherein the radiation is directed from a remote source. The radiation treatment can also be administered as internal therapy or brachytherapy wherein a radioactive source is placed inside the body close to cancer cells or a tumor mass. Also encompassed is the use of photodynamic therapy comprising the administration of photosensitizers, such as hematoporphyrin and its derivatives, Vertoporfin (BPD-MA), phthalocyanine, photosensitizer Pc4, demethoxy-hypocrellin A; and 2BA-2-DMHA.

[0391] In another embodiment, surgical intervention can occur to physically remove cancerous cells and/or tissues.

[0392] In still another embodiment, hormone therapy is used. Hormonal therapeutic treatments can comprise, for example, hormonal agonists, hormonal antagonists (e.g., flutamide, bicalutamide, tamoxifen, raloxifene, leuprolide acetate (LUPRON), LH-RH antagonists), inhibitors of hormone biosynthesis and processing, and steroids (e.g., dexamethasone, retinoids, deltoids, betamethasone, cortisol, cortisone, prednisone, dehydrotestosterone, glucocorticoids, mineralocorticoids, estrogen, testosterone, progestins), vitamin A derivatives (e.g., all-trans retinoic acid (ATRA)); vitamin D3 analogs; antigestagens (e.g., mifepristone, onapristone), or antiandrogens (e.g., cyproterone acetate).

[0393] In yet another embodiment, hyperthermia, a procedure in which body tissue is exposed to high temperatures (up to 106° F.) is used. Heat may help shrink tumors by damaging cells or depriving them of substances they need to live. Hyperthermia therapy can be local, regional, and whole-body hyperthermia, using external and internal heating devices. Hyperthermia is almost always used with other forms of therapy (e.g., radiation therapy, chemotherapy, and biological therapy) to try to increase their effectiveness. Local hyperthermia refers to heat that is applied to a very small area, such as a tumor. The area may be heated externally with high-frequency waves aimed at a tumor from a device outside the body. To achieve internal heating, one of several types of sterile probes may be used, including thin, heated wires or hollow tubes filled with warm water; implanted microwave antennae; and radiofrequency electrodes. In regional hyperthermia, an organ or a limb is heated. Magnets and devices that produce high energy are placed over the region to be heated. In another approach, called perfusion, some of the patient's blood is removed, heated, and then pumped (perfused) into the region that is to be heated internally. Whole-body heating is used to treat metastatic cancer that has spread throughout the body. It can be accomplished using warm-water blankets, hot wax, inductive coils (like those in electric blankets), or thermal chambers (similar to large incubators). Hyperthermia does not cause any marked increase in radiation side effects or complications. Heat applied directly to the skin, however, can cause discomfort or even significant local pain in about half the patients treated. It can also cause blisters, which generally heal rapidly.

[0394] In still another embodiment, photodynamic therapy (also called PDT, photoradiation therapy, phototherapy, or photochemotherapy) is used for the treatment of some types of cancer. It is based on the discovery that certain chemicals known as photosensitizing agents can kill one-celled organisms when the organisms are exposed to a particular type of light. PDT destroys cancer cells through the use of a fixed-frequency laser light in combination with a photosensitizing agent. In PDT, the photosensitizing agent is injected into the bloodstream and absorbed by cells all over the body. The agent remains in cancer cells for a longer time than it does in normal cells. When the treated cancer cells are exposed to laser light, the photosensitizing agent absorbs the light and produces an active form of oxygen that destroys the treated cancer cells. Light exposure must be timed carefully so that it occurs when most of the photosensitizing agent has left healthy cells but is still present in the cancer cells. The laser light used in PDT can be directed through a fiber-optic (a very thin glass strand). The fiber-optic is placed close to the cancer to deliver the proper amount of light. The fiber-optic can be directed through a bronchoscope into the lungs for the treatment of lung cancer or through an endoscope into the esophagus for the treatment of esophageal cancer. An advantage of PDT is that it causes minimal damage to healthy tissue. However, because the laser light currently in use cannot pass through more than about 3 centimeters of tissue (a little more than one and an eighth inch), PDT is mainly used to treat tumors on or just under the skin or on the lining of internal organs. Photodynamic therapy makes the skin and eyes sensitive to light for 6 weeks or more after treatment. Patients are advised to avoid direct sunlight and bright indoor light for at least 6 weeks. If patients must go outdoors, they need to wear protective clothing, including sunglasses. Other temporary side effects of PDT are related to the treatment of specific areas and can include coughing, trouble swallowing, abdominal pain, and painful breathing or shortness of breath. In December 1995, the U.S. Food and Drug Administration (FDA) approved a photosensitizing agent called porfimer sodium, or Photofrin®, to relieve symptoms of esophageal cancer that is causing an obstruction and for esophageal cancer that cannot be satisfactorily treated with lasers alone. In January 1998, the FDA approved porfimer sodium for the treatment of early nonsmall cell lung cancer in patients for whom the usual treatments for lung cancer are not appropriate. The National Cancer Institute and other institutions are supporting clinical trials (research studies) to evaluate the use of photodynamic therapy for several types of cancer, including cancers of the bladder, brain, larynx, and oral cavity.

[0395] In yet another embodiment, laser therapy is used to harness high-intensity light to destroy cancer cells. This technique is often used to relieve symptoms of cancer such as bleeding or obstruction, especially when the cancer cannot be cured by other treatments. It may also be used to treat cancer by shrinking or destroying tumors. The term “laser” stands for light amplification by stimulated emission of radiation. Ordinary light, such as that from a light bulb, has many wavelengths and spreads in all directions. Laser light, on the other hand, has a specific wavelength and is focused in a narrow beam. This type of high-intensity light contains a lot of energy. Lasers are very powerful and may be used to cut through steel or to shape diamonds. Lasers also can be used for very precise surgical work, such as repairing a damaged retina in the eye or cutting through tissue (in place of a scalpel). Although there are several different kinds of lasers, only three kinds have gained wide use in medicine: Carbon dioxide (CO₂) laser—This type of laser can remove thin layers from the skin's surface without penetrating the deeper layers. This technique is particularly useful in treating tumors that have not spread deep into the skin and certain precancerous conditions. As an alternative to traditional scalpel surgery, the CO₂ laser is also able to cut the skin. The laser is used in this way to remove skin cancers. Neodymium:yttrium-aluminum-garnet (Nd:YAG) laser—Light from this laser can penetrate deeper into tissue than light from the other types of lasers, and it can cause blood to clot quickly. It can be carried through optical fibers to less accessible parts of the body. This type of laser is sometimes used to treat throat cancers. Argon laser—This laser can pass through only superficial layers of tissue and is therefore useful in dermatology and in eye surgery. It also is used with light-sensitive dyes to treat tumors in a procedure known as photodynamic therapy (PDT). Lasers have several advantages over standard surgical tools, including: Lasers are more precise than scalpels. Tissue near an incision is protected, since there is little contact with surrounding skin or other tissue. The heat produced by lasers sterilizes the surgery site, thus reducing the risk of infection. Less operating time may be needed because the precision of the laser allows for a smaller incision. Healing time is often shortened; since laser heat seals blood vessels, there is less bleeding, swelling, or scarring. Laser surgery may be less complicated. For example, with fiber optics, laser light can be directed to parts of the body without making a large incision. More procedures may be done on an outpatient basis. Lasers can be used in two ways to treat cancer: by shrinking or destroying a tumor with heat, or by activating a chemical--known as a photosensitizing agent--that destroys cancer cells. In PDT, a photosensitizing agent is retained in cancer cells and can be stimulated by light to cause a reaction that kills cancer cells. CO₂ and Nd:YAG lasers are used to shrink or destroy tumors. They may be used with endoscopes, tubes that allow physicians to see into certain areas of the body, such as the bladder. The light from some lasers can be transmitted through a flexible endoscope fitted with fiber optics. This allows physicians to see and work in parts of the body that could not otherwise be reached except by surgery and therefore allows very precise aiming of the laser beam. Lasers also may be used with low-power microscopes, giving the doctor a clear view of the site being treated. Used with other instruments, laser systems can produce a cutting area as small as 200 microns in diameter--less than the width of a very fine thread. Lasers are used to treat many types of cancer. Laser surgery is a standard treatment for certain stages of glottis (vocal cord), cervical, skin, lung, vaginal, vulvar, and penile cancers. In addition to its use to destroy the cancer, laser surgery is also used to help relieve symptoms caused by cancer (palliative care). For example, lasers may be used to shrink or destroy a tumor that is blocking a patient's trachea (windpipe), making it easier to breathe. It is also sometimes used for palliation in colorectal and anal cancer. Laser-induced interstitial thermotherapy (LITT) is one of the most recent developments in laser therapy. LITT uses the same idea as a cancer treatment called hyperthermia; that heat may help shrink tumors by damaging cells or depriving them of substances they need to live. In this treatment, lasers are directed to interstitial areas (areas between organs) in the body. The laser light then raises the temperature of the tumor, which damages or destroys cancer cells.

[0396] The duration and/or dose of treatment with therapies may vary according to the particular therapeutic agent or combination thereof. An appropriate treatment time for a particular cancer therapeutic agent will be appreciated by the skilled artisan. The present invention contemplates the continued assessment of optimal treatment schedules for each cancer therapeutic agent, where the phenotype of the cancer of the subject as determined by the methods of the present invention is a factor in determining optimal treatment doses and schedules.

[0397] Any means for the introduction of a polynucleotide into mammals, human or non-human, or cells thereof may be adapted to the practice of this invention for the delivery of the various constructs encompassed by the present invention into the intended recipient. In one embodiment encompassed by the present invention, the DNA constructs are delivered to cells by transfection, i.e., by delivery of “naked” DNA or in a complex with a colloidal dispersion system. A colloidal system includes macromolecule complexes, nanocapsules, microspheres, beads, and lipid-based systems including oil-in-water emulsions, micelles, mixed micelles, and liposomes. The preferred colloidal system of this invention is a lipid-complexed or liposome-formulated DNA. In the former approach, prior to formulation of DNA, e.g., with lipid, a plasmid containing a transgene bearing the desired DNA constructs may first be experimentally optimized for expression (e.g., inclusion of an intron in the 5′ untranslated region and elimination of unnecessary sequences (Felgner, et al., Ann NY Acad Sci 126-139, 1995). Formulation of DNA, e.g. with various lipid or liposome materials, may then be effected using known methods and materials and delivered to the recipient mammal. See, e.g., Canonico et al, Am J Respir Cell Mol Biol 10:24-29, 1994; Tsan et al, Am J Physiol 268; Alton et al., Nat Genet. 5:135-142, 1993 and U.S. Pat. No. 5,679,647 by Carson et al.

[0398] The targeting of liposomes can be classified based on anatomical and mechanistic factors. Anatomical classification is based on the level of selectivity, for example, organ-specific, cell-specific, and organelle-specific. Mechanistic targeting can be distinguished based upon whether it is passive or active. Passive targeting utilizes the natural tendency of liposomes to distribute to cells of the reticulo-endothelial system (RES) in organs, which contain sinusoidal capillaries. Active targeting, on the other hand, involves alteration of the liposome by coupling the liposome to a specific ligand such as a monoclonal antibody, sugar, glycolipid, or protein, or by changing the composition or size of the liposome in order to achieve targeting to organs and cell types other than the naturally occurring sites of localization.

[0399] The surface of the targeted delivery system may be modified in a variety of ways. In the case of a liposomal targeted delivery system, lipid groups can be incorporated into the lipid bilayer of the liposome in order to maintain the targeting ligand in stable association with the liposomal bilayer. Various linking groups can be used for joining the lipid chains to the targeting ligand. Naked DNA or DNA associated with a delivery vehicle, e.g., liposomes, can be administered to several sites in a subject (see below).

[0400] Nucleic acids can be delivered in any desired vector. These include viral or non-viral vectors, including adenovirus vectors, adeno-associated virus vectors, retrovirus vectors, lentivirus vectors, and plasmid vectors. Exemplary types of viruses include HSV (herpes simplex virus), AAV (adeno associated virus), HIV (human immunodeficiency virus), BIV (bovine immunodeficiency virus), and MLV (murine leukemia virus). Nucleic acids can be administered in any desired format that provides sufficiently efficient delivery levels, including in virus particles, in liposomes, in nanoparticles, and complexed to polymers.

[0401] The nucleic acids encoding a protein or nucleic acid of interest may be in a plasmid or viral vector, or other vector as is known in the art. Such vectors are well-known and any can be selected for a particular application. In one embodiment encompassed by the present invention, the gene delivery vehicle comprises a promoter and a demethylase coding sequence. Preferred promoters are tissue-specific promoters and promoters which are activated by cellular proliferation, such as the thymidine kinase and thymidylate synthase promoters. Other preferred promoters include promoters which are activatable by infection with a virus, such as the a- and 0-interferon promoters, and promoters which are activatable by a hormone, such as estrogen. Other promoters which can be used include the Moloney virus LTR, the CMV promoter, and the mouse albumin promoter. A promoter may be constitutive or inducible.

[0402] In another embodiment, naked polynucleotide molecules are used as gene delivery vehicles, as described in WO 90/11092 and U.S. Pat. No. 5,580,859. Such gene delivery vehicles can be either growth factor DNA or RNA and, in certain embodiments, are linked to killed adenovirus. Curiel et al., Hum. Gene. Ther. 3:147-154, 1992. Other vehicles which can optionally be used include DNA-ligand (Wu et al., J. Biol. Chem. 264:16985-16987, 1989), lipid-DNA combinations (Felgner et al., Proc. Natl. Acad. Sci. USA 84:7413 7417, 1989), liposomes (Wang et al., Proc. Natl. Acad. Sci. 84:7851-7855, 1987) and microprojectiles (Williams et al., Proc. Natl. Acad. Sci. 88:2726-2730, 1991).

[0403] A gene delivery vehicle can optionally comprise viral sequences such as a viral origin of replication or packaging signal. These viral sequences can be selected from viruses such as astrovirus, coronavirus, orthomyxovirus, papovavirus, paramyxovirus, parvovirus, picornavirus, poxvirus, retrovirus, togavirus or adenovirus. In a preferred embodiment, the growth factor gene delivery vehicle is a recombinant retroviral vector. Recombinant retroviruses and various uses thereof have been described in numerous references including, for example, Mann et al., Cell 33:153, 1983, Cane and Mulligan, Proc. Nat'l. Acad. Sci. USA 81:6349, 1984, Miller et al., Human Gene Therapy 1:5-14, 1990, U.S. Pat. Nos. 4,405,712, 4,861,719, and 4,980,289, and PCT Application Nos. WO 89/02,468, WO 89/05,349, and WO 90/02,806. Numerous retroviral gene delivery vehicles can be utilized in the present invention, including for example those described in EP 0,415,731; WO 90/07936; WO 94/03622; WO 93/25698; WO 93/25234; U.S. Pat. No. 5,219,740; WO 9311230; WO 9310218; Vile and Hart, Cancer Res. 53:3860-3864, 1993; Vile and Hart, Cancer Res. 53:962-967, 1993; Ram et al., Cancer Res. 53:83-88, 1993; Takamiya et al., J. Neurosci. Res. 33:493-503, 1992; Baba et al., J. Neurosurg. 79:729-735, 1993 (U.S. Pat. No. 4,777,127, GB 2,200,651, EP 0,345,242 and WO91/02805).

[0404] Other viral vector systems that can be used to deliver a polynucleotide encompassed by the present invention have been derived from herpes virus, e.g., Herpes Simplex Virus (U.S. Pat. No. 5,631,236 by Woo et al., issued May 20, 1997 and WO 00/08191 by Neurovex), vaccinia virus (Ridgeway (1988) Ridgeway, “Mammalian expression vectors,” In: Rodriguez R L, Denhardt D T, ed. Vectors: A survey of molecular cloning vectors and their uses. Stoneham: Butterworth; Baichwal and Sugden (1986) “Vectors for gene transfer derived from animal DNA viruses: Transient and stable expression of transferred genes,” In: Kucherlapati R, ed. Gene transfer. New York: Plenum Press; Coupar et al. (1988) Gene, 68:1-10), and several RNA viruses. Preferred viruses include an alphavirus, a poxivirus, an arena virus, a vaccinia virus, a polio virus, and the like. They offer several attractive features for various mammalian cells (Friedmann (1989) Science, 244:1275-1281; Ridgeway, 1988, supra; Baichwal and Sugden, 1986, supra; Coupar et al., 1988; Horwich et al. (1990) J. Virol., 64:642-650).

[0405] In other embodiments, target DNA in the genome can be manipulated using well-known methods in the art. For example, the target DNA in the genome can be manipulated by deletion, insertion, and/or mutation are retroviral insertion, artificial chromosome techniques, gene insertion, random insertion with tissue specific promoters, gene targeting, transposable elements and/or any other method for introducing foreign DNA or producing modified DNA/modified nuclear DNA. Other modification techniques include deleting DNA sequences from a genome and/or altering nuclear DNA sequences. Nuclear DNA sequences, for example, may be altered by site-directed mutagenesis.

[0406] In other embodiments, recombinant biomarker polypeptides, and fragments thereof, can be administered to subjects. In some embodiments, fusion proteins can be constructed and administered which have enhanced biological properties. In addition, the biomarker polypeptides, and fragment thereof, can be modified according to well-known pharmacological methods in the art (e.g., pegylation, glycosylation, oligomerization, etc.) in order to further enhance desirable biological activities, such as increased bioavailability and decreased proteolytic degradation.

### VII. Clinical Efficacy

[0407] Clinical efficacy can be measured by any method known in the art. For example, the response to a cancer therapy (e.g., an agent inhibiting binding of a SS18-SSX fusion protein to an H2A K119Ub-marked nucleosome), relates to any response of the cancer, e.g., a tumor, to the therapy, preferably to a change in tumor mass and/or volume after initiation of neoadjuvant or adjuvant chemotherapy. Tumor response may be assessed in a neoadjuvant or adjuvant situation where the size of a tumor after systemic intervention can be compared to the initial size and dimensions as measured by CT, PET, mammogram, ultrasound or palpation and the cellularity of a tumor can be estimated histologically and compared to the cellularity of a tumor biopsy taken before initiation of treatment. Response may also be assessed by caliper measurement or pathological examination of the tumor after biopsy or surgical resection. Response may be recorded in a quantitative fashion like percentage change in tumor volume or cellularity or using a semi-quantitative scoring system such as residual cancer burden (Symmans et al., J. Clin. Oncol. (2007) 25:4414-4422) or Miller-Payne score (Ogston et al., (2003) Breast (Edinburgh, Scotland) 12:320-327) in a qualitative fashion like “pathological complete response” (pCR), “clinical complete remission” (cCR), “clinical partial remission” (cPR), “clinical stable disease” (cSD), “clinical progressive disease” (cPD) or other qualitative criteria. Assessment of tumor response may be performed early after the onset of neoadjuvant or adjuvant therapy, e.g., after a few hours, days, weeks or preferably after a few months. A typical endpoint for response assessment is upon termination of neoadjuvant chemotherapy or upon surgical removal of residual tumor cells and/or the tumor bed.

[0408] In some embodiments, clinical efficacy of the therapeutic treatments described herein may be determined by measuring the clinical benefit rate (CBR). The clinical benefit rate is measured by determining the sum of the percentage of patients who are in complete remission (CR), the number of patients who are in partial remission (PR) and the number of patients having stable disease (SD) at a time point at least 6 months out from the end of therapy. The shorthand for this formula is CBR=CR+PR+SD over 6 months. In some embodiments, the CBR for a particular agent that inhibits binding of a SS18-SSX fusion protein to an H2A K119Ub-marked nucleosome therapeutic regimen is at least 25%, 30%, 35%, 40%, 45%, 50%, 55%, 60%, 65%, 70%, 75%, 80%, 85%, or more.

[0409] Additional criteria for evaluating the response to cancer therapy (e.g., an agent that inhibits binding of a SS18-SSX fusion protein to an H2A K119Ub-marked nucleosome) are related to “survival,” which includes all of the following: survival until mortality, also known as overall survival (wherein said mortality may be either irrespective of cause or tumor related); “recurrence-free survival” (wherein the term recurrence shall include both localized and distant recurrence); metastasis free survival; disease free survival (wherein the term disease shall include cancer and diseases associated therewith). The length of said survival may be calculated by reference to a defined start point (e.g., time of diagnosis or start of treatment) and end point (e.g., death, recurrence or metastasis). In addition, criteria for efficacy of treatment can be expanded to include response to chemotherapy, probability of survival, probability of metastasis within a given time period, and probability of tumor recurrence.

[0410] For example, in order to determine appropriate threshold values, a particular agent inhibiting binding of a SS18-SSX fusion protein to an H2A K119Ub-marked nucleosome can be administered to a population of subjects and the outcome can be correlated to biomarker measurements that were determined prior to administration of any cancer therapy (e.g., an agent inhibiting binding of a SS18-SSX fusion protein to an H2A K119Ub-marked nucleosome). The outcome measurement may be pathologic response to therapy given in the neoadjuvant setting. Alternatively, outcome measures, such as overall survival and disease-free survival can be monitored over a period of time for subjects following cancer therapy (e.g., an agent inhibiting binding of a SS18-SSX fusion protein to an H2A K119Ub-marked nucleosome) for whom biomarker measurement values are known. In certain embodiments, the same doses of the agent inhibiting binding of a SS18-SSX fusion protein to an H2A K119Ub-marked nucleosome are administered to each subject. In related embodiments, the doses administered are standard doses known in the art for the agent inhibiting binding of a SS18-SSX fusion protein to an H2A K119Ub-marked nucleosome. The period of time for which subjects are monitored can vary. For example, subjects may be monitored for at least 2, 4, 6, 8, 10, 12, 14, 16, 18, 20, 25, 30, 35, 40, 45, 50, 55, or 60 months. Biomarker measurement threshold values that correlate to outcome of a cancer therapy (e.g., inhibiting binding of a SS18-SSX fusion protein to an H2A K119Ub-marked nucleosome) can be determined using methods such as those described in the Examples section.

### VIII. Further Uses and Methods of the Present Invention

[0411] The compositions described herein can be used in a variety of diagnostic, prognostic, and therapeutic applications. In any method described herein, such as a diagnostic method, prognostic method, therapeutic method, or combination thereof, all steps of the method can be performed by a single actor or, alternatively, by more than one actor. For example, diagnosis can be performed directly by the actor providing therapeutic treatment. Alternatively, a person providing a therapeutic agent can request that a diagnostic assay be performed. The diagnostician and/or the therapeutic interventionist can interpret the diagnostic assay results to determine a therapeutic strategy. Similarly, such alternative processes can apply to other assays, such as prognostic assays.

a. Screening Methods

[0412] One aspect of the present invention relates to screening assays, including non-cell based assays and xenograft animal model assays. In one embodiment, the assays provide a method for identifying whether a cancer is likely to respond to cancer therapy (e.g., an agent inhibiting binding of a SS18-SSX fusion protein to an H2A K119Ub-marked nucleosome), such as in a human by using a xenograft animal model assay, and/or whether an agent can inhibit the growth of or kill a cancer cell that is unlikely to respond to cancer therapy (e.g., an agent inhibiting binding of a SS18-SSX fusion protein to an H2A K119Ub-marked nucleosome).

[0413] In one embodiment, an assay is a cell-based assay, comprising contacting a synovial sarcoma cancer cell with a test agent, and determining the ability of the test agent to decrease (1) binding of a SS18-SSX fusion protein to a H2A K119Ub nucleosome; (2) recruitment of a SS18-SSX fusion protein-bound BAF complex to a H2A K119Ub nucleosome; and/or (3) expression of at least one a SS18-SSX fusion protein target gene.

[0414] In another embodiment, an assay is a cell-free assay, comprising a) mixing a protein comprising a c-terminal basic region and a c-terminal acidic region of a SSX protein, and a H2A K119Ub nucleosome together; b) adding a test agent to the mixture; and c) determining the ability of the test agent to decrease binding of the protein to the H2A K119Ub nucleosome, and/or recruitment of the BAF complex to the H2A K119Ub nucleosome.

[0415] For example, in a direct binding assay, one protein (or their respective target polypeptides or molecules) can be coupled with a radioisotope or enzymatic label such that binding can be determined by detecting the labeled protein or molecule in a complex. For example, the targets can be labeled with ¹²⁵I, ³⁵S, ¹⁴C, or ³H, either directly or indirectly, and the radioisotope detected by direct counting of radioemmission or by scintillation counting. Alternatively, the targets can be enzymatically labeled with, for example, horseradish peroxidase, alkaline phosphatase, or luciferase, and the enzymatic label detected by determination of conversion of an appropriate substrate to product.

[0416] Determining the interaction between two molecules (e.g., a nucleosome and a SS18-SSX fusion protein) can be accomplished using standard binding or enzymatic analysis assays. These assays may include thermal shift assays (measure of variation of the melting temperature of the protein alone and in the presence of a molecule) (R. Zhang, F. Monsma, Curr. Opin. Drug Discov. Devel., 13 (4) (2010), pp. 389-402), SPR (surface plasmon resonance) (T. Neumann, et al. Curr. Top Med. Chem., 7 (16) (2007), pp. 1630-1642), FRET/BRET (Fluorescence or Bioluminescence Resonance Excitation Transfer) (A. L. Mattheyses, A. I. Marcus, Methods Mol. Biol., 1278 (2015), pp. 329-339; J. Bacart, et al. Biotechnol. J., 3 (3) (2008), pp. 311-324), Elisa (Enzyme-linked immunosorbent assay) (Z. Weng, Q. Zhao, Methods Mol. Biol., 1278 (2015), pp. 341-352), fluorescence polarization (Y. Du, Methods Mol. Biol., 1278 (2015), pp. 529-544), and Far western (U. Mahlknecht, O. G. Ottmann, D. Hoelzer J. Biotechnol., 88 (2) (2001), pp. 89-94) or other techniques. More sophisticated (and lower throughput) biophysical methods that provide structural or thermodynamic details of the molecule binding mode (using isothermal calorimetry (ITC), Nuclear Magnetic Resonance (NMR), and X-ray crystallography) may also be needed for further validation and characterization of potential hits.

[0417] Alternatively, high throughput cellular screens measuring the loss of interaction using reverse two hybrid or BRET may be used and offer the advantage of selecting only cell penetrable molecules (A. R. Horswill, S. N. Savinov, S. J. Benkovic Proc. Natl. Acad. Sci. USA, 101 (44) (2004), pp. 15591-15596; A. Hamdi, P. Colas Trends Pharmacol. Sci., 33 (2) (2012), pp. 109-118). The latter approaches require further validation to assess the “on target” effect. In one or more embodiments of the above described assay methods, it may be desirable to immobilize polypeptides or molecules to facilitate separation of complexed from uncomplexed forms of one or both of the proteins or molecules, as well as to accommodate automation of the assay.

[0418] Binding of a test agent to a target can be accomplished in any vessel suitable for containing the reactants. Non-limiting examples of such vessels include microtiter plates, test tubes, and micro-centrifuge tubes. Immobilized forms of the antibodies of the present invention can also include antibodies bound to a solid phase like a porous, microporous (with an average pore diameter less than about one micron) or macroporous (with an average pore diameter of more than about 10 microns) material, such as a membrane, cellulose, nitrocellulose, or glass fibers; a bead, such as that made of agarose or polyacrylamide or latex; or a surface of a dish, plate, or well, such as one made of polystyrene.

[0419] In an alternative embodiment, determining the ability of the agent to inhibit binding of a SS18-SSX fusion protein to an H2A K119Ub-marked nucleosomecan be accomplished by determining the ability of the test agent to modulate the activity of a polypeptide or other product that functions downstream or upstream of its position within the pathway. For example, it can be accomplished by measuring the activity of the downstream target genes of SS18-SSX fusion protein.

[0420] The present invention further pertains to novel agents identified by the above-described screening assays. Accordingly, it is within the scope of this invention to further use an agent identified as described herein in an appropriate animal model. For example, an agent identified as described herein can be used in an animal model to determine the efficacy, toxicity, or side effects of treatment with such an agent. Alternatively, an antibody identified as described herein can be used in an animal model to determine the mechanism of action of such an agent.

b. Predictive Medicine

[0421] The present invention also pertains to the field of predictive medicine in which diagnostic assays, prognostic assays, and monitoring clinical trials are used for prognostic (predictive) purposes to thereby treat an individual prophylactically. Accordingly, one aspect of the present invention relates to diagnostic assays for determining the amount and/or activity level of a biomarker described herein in the context of a biological sample (e.g., blood, serum, cells, or tissue) to thereby determine whether an individual afflicted with a cancer is likely to respond to an agent inhibiting binding of a SS18-SSX fusion protein to an H2A K119Ub-marked nucleosome, such as in a cancer. Such assays can be used for prognostic or predictive purpose to thereby prophylactically treat an individual prior to the onset or after recurrence of a disorder characterized by or associated with biomarker polypeptide, nucleic acid expression or activity. The skilled artisan will appreciate that any method can use one or more (e.g., combinations) of biomarkers described herein, such as those in the tables, figures, examples, and otherwise described in the specification.

[0422] Another aspect of the present invention pertains to monitoring the influence of agents (e.g., drugs, compounds, and small nucleic acid-based molecules) on the expression or activity of a biomarker described herein. These and other agents are described in further detail in the following sections.

[0423] The skilled artisan will also appreciate that, in certain embodiments, the methods of the present invention implement a computer program and computer system. For example, a computer program can be used to perform the algorithms described herein. A computer system can also store and manipulate data generated by the methods of the present invention which comprises a plurality of biomarker signal changes/profiles which can be used by a computer system in implementing the methods of this invention. In certain embodiments, a computer system receives biomarker expression data; (ii) stores the data; and (iii) compares the data in any number of ways described herein (e.g., analysis relative to appropriate controls) to determine the state of informative biomarkers from cancerous or pre-cancerous tissue. In other embodiments, a computer system (i) compares the determined expression biomarker level to a threshold value; and (ii) outputs an indication of whether said biomarker level is significantly modulated (e.g., above or below) the threshold value, or a phenotype based on said indication.

[0424] In certain embodiments, such computer systems are also considered part of the present invention. Numerous types of computer systems can be used to implement the analytic methods of this invention according to knowledge possessed by a skilled artisan in the bioinformatics and/or computer arts. Several software components can be loaded into memory during operation of such a computer system. The software components can comprise both software components that are standard in the art and components that are special to the present invention (e.g., dCHIP software described in Lin et al. (2004) Bioinformatics 20, 1233-1240; radial basis machine learning algorithms (RBM) known in the art).

[0425] The methods encompassed by the present invention can also be programmed or modeled in mathematical software packages that allow symbolic entry of equations and high-level specification of processing, including specific algorithms to be used, thereby freeing a user of the need to procedurally program individual equations and algorithms. Such packages include, e.g., Matlab from Mathworks (Natick, Mass.), Mathematica from Wolfram Research (Champaign, Ill.) or S-Plus from MathSoft (Seattle, Wash.).

[0426] In certain embodiments, the computer comprises a database for storage of biomarker data. Such stored profiles can be accessed and used to perform comparisons of interest at a later point in time. For example, biomarker expression profiles of a sample derived from the non-cancerous tissue of a subject and/or profiles generated from population-based distributions of informative loci of interest in relevant populations of the same species can be stored and later compared to that of a sample derived from the cancerous tissue of the subject or tissue suspected of being cancerous of the subject.

[0427] In addition to the exemplary program structures and computer systems described herein, other, alternative program structures and computer systems will be readily apparent to the skilled artisan. Such alternative systems, which do not depart from the above described computer system and programs structures either in spirit or in scope, are therefore intended to be comprehended within the accompanying claims.

c. Diagnostic Assays

[0428] The present invention provides, in part, methods, systems, and code for accurately classifying whether a biological sample is associated with a cancer that is likely to respond to cancer therapy (e.g., an agent that inhibits binding of a SS18-SSX fusion protein to an H2A K119Ub-marked nucleosome). In some embodiments, the present invention is useful for classifying a sample (e.g., from a subject) as associated with or at risk for responding to or not responding to cancer therapy (e.g., an agent that inhibits binding of a SS18-SSX fusion protein to an H2A K119Ub-marked nucleosome) using a statistical algorithm and/or empirical data (e.g., the amount or activity of a biomarker described herein, such as in the tables, figures, examples, and otherwise described in the specification).

[0429] An exemplary method for detecting the amount or activity of a biomarker described herein, and thus useful for classifying whether a sample is likely or unlikely to respond to cancer therapy (e.g., an agent that inhibits binding of a SS18-SSX fusion protein to an H2A K119Ub-marked nucleosome) involves obtaining a biological sample from a test subject and contacting the biological sample with an agent, such as a protein-binding agent like an antibody or antigen-binding fragment thereof, or a nucleic acid-binding agent like an oligonucleotide, capable of detecting the amount or activity of the biomarker in the biological sample. In some embodiments, at least one antibody or antigen-binding fragment thereof is used, wherein two, three, four, five, six, seven, eight, nine, ten, or more such antibodies or antibody fragments can be used in combination (e.g., in sandwich ELISAs) or in serial. In certain instances, the statistical algorithm is a single learning statistical classifier system. For example, a single learning statistical classifier system can be used to classify a sample as a based upon a prediction or probability value and the presence or level of the biomarker. The use of a single learning statistical classifier system typically classifies the sample as, for example, a likely cancer therapy (e.g., an agent that inhibits binding of a SS18-SSX fusion protein to an H2A K119Ub-marked nucleosome) responder or progressor sample with a sensitivity, specificity, positive predictive value, negative predictive value, and/or overall accuracy of at least about 75%, 76%, 77%, 78%, 79%, 80%, 81%, 82%, 83%, 84%, 85%, 86%, 87%, 88%, 89%, 90%, 91%, 92%, 93%, 94%, 95%, 96%, 97%, 98%, or 99%.

[0430] Other suitable statistical algorithms are well-known to those of skill in the art. For example, learning statistical classifier systems include a machine learning algorithmic technique capable of adapting to complex data sets (e.g., panel of markers of interest) and making decisions based upon such data sets. In some embodiments, a single learning statistical classifier system such as a classification tree (e.g., random forest) is used. In other embodiments, a combination of 2, 3, 4, 5, 6, 7, 8, 9, 10, or more learning statistical classifier systems are used, preferably in tandem. Examples of learning statistical classifier systems include, but are not limited to, those using inductive learning (e.g., decision/classification trees such as random forests, classification and regression trees (C&RT), boosted trees, etc.), Probably Approximately Correct (PAC) learning, connectionist learning (e.g., neural networks (NN), artificial neural networks (ANN), neuro fuzzy networks (NFN), network structures, perceptrons such as multi-layer perceptrons, multi-layer feed-forward networks, applications of neural networks, Bayesian learning in belief networks, etc.), reinforcement learning (e.g., passive learning in a known environment such as naive learning, adaptive dynamic learning, and temporal difference learning, passive learning in an unknown environment, active learning in an unknown environment, learning action-value functions, applications of reinforcement learning, etc.), and genetic algorithms and evolutionary programming. Other learning statistical classifier systems include support vector machines (e.g., Kernel methods), multivariate adaptive regression splines (MARS), Levenberg-Marquardt algorithms, Gauss-Newton algorithms, mixtures of Gaussians, gradient descent algorithms, and learning vector quantization (LVQ). In certain embodiments, the method of the present invention further comprises sending the sample classification results to a clinician, e.g., an oncologist.

[0431] In another embodiment, the diagnosis of a subject is followed by administering to the individual a therapeutically effective amount of a defined treatment based upon the diagnosis.

[0432] In one embodiment, the methods further involve obtaining a control biological sample (e.g., biological sample from a subject who does not have a cancer or whose cancer is susceptible to cancer therapy (e.g., an agent that inhibits binding of a SS18-SSX fusion protein to an H2A K119Ub-marked nucleosome), a biological sample from the subject during remission, or a biological sample from the subject during treatment for developing a cancer progressing despite cancer therapy (e.g., an agent that inhibits binding of a SS18-SSX fusion protein to an H2A K119Ub-marked nucleosome).

d. Prognostic Assays

[0433] The diagnostic methods described herein can furthermore be utilized to identify subjects having or at risk of developing a cancer that is likely or unlikely to be responsive to cancer therapy (e.g., an agent that inhibits binding of a SS18-SSX fusion protein to an H2A K119Ub-marked nucleosome). The assays described herein, such as the preceding diagnostic assays or the following assays, can be utilized to identify a subject having or at risk of developing a disorder associated with a misregulation of the amount or activity of at least one biomarker described in, such as in cancer. Alternatively, the prognostic assays can be utilized to identify a subject having or at risk for developing a disorder associated with a misregulation of the at least one biomarker described herein, such as in cancer. Furthermore, the prognostic assays described herein can be used to determine whether a subject can be administered an agent (e.g., an agonist, antagonist, peptidomimetic, polypeptide, peptide, nucleic acid, small molecule, or other drug candidate) to treat a disease or disorder associated with the aberrant biomarker expression or activity.

e. Treatment Methods

[0434] The therapeutic compositions described herein, such as the agent that inhibits binding of a SS18-SSX fusion protein to an H2A K119Ub-marked nucleosome, can be used in a variety of in vitro and in vivo therapeutic applications using the formulations and/or combinations described herein. In one embodiment, the therapeutic agents can be used to treat cancers determined to be responsive thereto. For example, single or multiple agents that inhibit binding of a SS18-SSX fusion protein to an H2A K119Ub-marked nucleosome can be used to treat cancers in subjects identified as likely responders thereto.

[0435] Treatment methods of the present invention involve contacting a cell, such as a cancer cell with an agent that inhibits binding of a SS18-SSX fusion protein to an H2A K119Ub-marked nucleosome. An agent that inhibits binding of a SS18-SSX fusion protein to an H2A K119Ub-marked nucleosome can be an agent as described herein, such as a small molecule, a nucleic acid, a polypeptide, an antibody, or a peptidomimetic. In one embodiment, the agent binds to H2A K119Ub-marked nucleosomes or the SS18-SSX fusion protein at the interaction interface between the H2A K119Ub-marked nucleosomes and the SS18-SSX fusion protein, thereby blocking or competing with the H2A K119Ub-marked nucleosomes and the SS18-SSX fusion protein interaction formation. For example, the agent may bind to the basic region (e.g., the RLR motif) and/or the acidic region of the SS18-SSX fusion protein. The agent may bind to the acidic patch or the H2A K119Ub mark of the H2A K119Ub-marked neucleosomes. In another embodiment, the agent binds to another site of the H2A K119Ub-marked nucleosomes or the the SS18-SSX fusion protein and capable of inducing a conformational change leading to a loss of interaction with the targeted partner. In yet another embodiment, the agent inhibits the function or activity of a domain or a site of the H2A K119Ub-marked nucleosomes or the SS18-SSX fusion protein that is necessary for the H2A K119Ub-marked nucleosomes and the SS18-SSX fusion protein interaction formation. In still another embodiment, the agent inhibits the H2A ubiquitination of neucleosomes, induces deletion or mutation of the acidic patch of the H2A K119Ub-marked nucleosomes, and/or induces deletion or mutation of the basic region (e.g., RLR motif) of the SS18-SSX fusion protein itself, thus breaking the H2A K119Ub-marked nucleosomes and the SS18-SSX fusion protein interaction. In one embodiment, the agent inhibits ubiquitin ligase activity of a PRC1 complex. For example, the agent may reduces expression, copy number, and/or ubiquitin ligase activity of RING1A and/or RING1B. In another embodiment, the agent is a CRISPR/Cas9 reagent that targets the critical residues on the SS18-SSX fusion protein or the H2A K119Ub-marked nucleosomes important for the SS18-SSX fusion protein and the H2A K119Ub-marked nucleosomes interaction, which include but are no tlimited to the critical residues identified in the examples herein.

[0436] These treatment methods can be performed in vitro (e.g., by contacting the cell with the agent) or, alternatively, by contacting an agent with cells in vivo (e.g., by administering the agent to a subject). As such, the present invention provides methods useful for treating an individual afflicted with a condition that would benefit from a decreased activity of SS18-SSX target genes by inhibiting binding of a SS18-SSX fusion protein to an H2A K119Ub-marked nucleosome, such as a cancer like synovial sarcoma. In one embodiment, the method involves administering an agent (e.g., an agent identified by a screening assay described herein), or combination of agents that inhibit SS18-SSX target genes expression or activity.

[0437] In addition, these inhibitory agents can also be administered in combination therapy with, e.g., chemotherapeutic agents, hormones, antiangiogens, radiolabelled, compounds, or with surgery, cryotherapy, and/or radiotherapy. The preceding treatment methods can be administered in conjunction with other forms of conventional therapy (e.g., standard-of-care treatments for cancer well-known to the skilled artisan), either consecutively with, pre- or post-conventional therapy. For example, these modulatory agents can be administered with a therapeutically effective dose of chemotherapeutic agent. In another embodiment, these modulatory agents are administered in conjunction with chemotherapy to enhance the activity and efficacy of the chemotherapeutic agent. The Physicians' Desk Reference (PDR) discloses dosages of chemotherapeutic agents that have been used in the treatment of various cancers. The dosing regimen and dosages of these aforementioned chemotherapeutic drugs that are therapeutically effective will depend on the particular melanoma, being treated, the extent of the disease and other factors familiar to the physician of skill in the art and can be determined by the physician.

### IX. Isolated Modified Protein Complexes

[0438] The present invention relates, in part, to an isolated modified protein complex selected from the group consisting of protein complexes listed in Table 3, wherein the isolated modified protein complex comprises at least one subunit that is modified.

[0439] In certain embodiments, at least one subunit of a complex encompassed by the present invention is a homolog, a derivative, e.g., a functionally active derivative, a fragment, e.g., a functionally active fragment, of a protein subunit of a complex encompassed by the present invention. In certain embodiments encompassed by the present invention, a homolog, derivative or fragment of a protein subunit of a complex encompassed by the present invention is still capable of forming a complex with the other subunit(s). Complex-formation can be tested by any method known to the skilled artisan. Such methods include, but are not limited to, non-denaturing PAGE, FRET, and Fluorescence Polarization Assay.

[0440] Homologs (e.g., nucleic acids encoding subunit proteins from other species) or other related sequences (e.g., paralogs) which are members of a native cellular protein complex can be identified and obtained by low, moderate or high stringency hybridization with all or a portion of the particular nucleic acid sequence as a probe, using methods well known in the art for nucleic acid hybridization and cloning.

[0441] Exemplary moderately stringent hybridization conditions are as follows: prehybridization of filters containing DNA is carried out for 8 hours to overnight at 65° C. in buffer composed of 6×SSC, 50 mM Tris-HCl (pH 7.5), 1 mM EDTA, 0.02% PVP, 0.02% Ficoll, 0.02% BSA, and 500 μg/ml denatured salmon sperm DNA. Filters are hybridized for 48 hours at 65° C. in prehybridization mixture containing 100 μg/ml denatured salmon sperm DNA and 5-20×10⁶ cpm of ³²P-labeled probe. Washing of filters is done at 37° C. for 1 hour in a solution containing 2×SSC, 0.01% PVP, 0.01% Ficoll, and 0.01% BSA. This is followed by a wash in 0.1×SSC at 50° C. for 45 min before autoradiography. Alternatively, exemplary conditions of high stringency are as follows: e.g., hybridization to filter-bound DNA in 0.5 μM NaHPO₄, 7% sodium dodecyl sulfate (SDS), 1 mM EDTA at 65° C., and washing in 0.1×SSC/0.1% SDS at 68° C. (Ausubel et al., eds., 1989, Current Protocols in Molecular Biology, Vol. I, Green Publishing Associates, Inc., and John Wiley & sons, Inc., New York, at p.2.10.3). Other conditions of high stringency which may be used are well known in the art. Exemplary low stringency hybridization conditions comprise hybridization in a buffer comprising 35% formamide, 5×SSC, 50 mM Tris-HCl (pH 7.5), 5 mM EDTA, 0.02% PVP, 0.02% Ficoll, 0.2% BSA, 100 μg/ml denatured salmon sperm DNA, and 1 0% (wt/vol) dextran sulfate for 18-20 hours at 40° C., washing in a buffer consisting of 2×SSC, 25 mM Tris-HCl (pH 7.4), 5 mM EDTA, and 0.1% SDS for 1.5 hours at 55° C., and washing in a buffer consisting of 2×SSC, 25 mM Tris-HCl (pH 7.4), 5 mM EDTA, and 0.1% SDS for 1.5 hours at 60° C.

[0442] In certain embodiments, a homolog of a subunit binds to the same proteins to which the subunit binds. In certain, more specific embodiments, a homolog of a subunit binds to the same proteins to which the subunit binds wherein the binding affinity between the homolog and the binding partner of the subunit is at least 10%, at least 20%, at least 30%, at least 40%, at least 50%, at least 60%, at least 70%, at least 80%, at least 90%, at least 95% or at least 98% of the binding affinity between the subunit and the binding partner. Binding affinities between proteins can be determined by any method known to the skilled artisan.

[0443] In certain embodiments, a fragment of a protein subunit of the complex consists of at least 6 (continuous) amino acids, of at least 10, at least 20 amino acids, at least 30 amino acids, at least 40 amino acids, at least 50 amino acids, at least 75 amino acids, at least 100 amino acids, at least 150 amino acids, at least 200 amino acids, at least 250 amino acids, at least 300 amino acids, at least 400 amino acids, or at least 500 amino acids of the protein subunit of the naturally occurring protein complex. In specific embodiments. Such fragments are not larger than 40 amino acids, 50 amino acids, 75 amino acids, 100 amino acids, 150 amino acids, 200 amino acids, 250 amino acids, 300 amino acids, 400 amino acids, or than 500 amino acids. In more specific embodiments, the functional fragment is capable of forming a complex encompassed by the present invention, i.e., the fragment can still bind to at least one other protein subunit to form a complex encompassed by the present invention. In one embodiment, the fragment of the subunit comprises the basic region and/or the acidic region of a SSX protein. In another embodiment, the fragment of the subunit comprises c-terminal 34 amino acids (aa155-188) of a SSX protein. In still another embodiment, the fragment of the subunit comprises c-terminal 78 amino acids (aa 111-188) of a SSX protein. The SSX protein may be selected form the group comsisting of human SSX1, SSX2, SSX3, SSX4, SSX6, SSX7, SSX8, and SSX9. In yet another embodiment, the fragment of the subunit comprises the acidic patch of a nucleosome and/or the H2A K119 Ub mark.

[0444] Derivatives or analogs of subunit proteins include, but are not limited, to molecules comprising regions that are substantially homologous to the subunit proteins, in various embodiments, by at least 30%, 40%, 50%, 60%, 70%, 80%, 90% or 95% identity over an amino acid sequence of identical size or when compared to an aligned sequence in which the alignment is done by a computer homology program known in the art, or whose encoding nucleic acid is capable of hybridizing to a sequence encoding the subunit protein under stringent, moderately stringent, or nonstringent conditions.

[0445] Derivatives of a protein subunit include, but are not limited to, fusion proteins of a protein subunit of a complex encompassed by the present invention to a heterologous amino acid sequence, mutant forms of a protein subunit of a complex encompassed by the present invention, and chemically modified forms of a protein subunit of a complex encompassed by the present invention. In a specific embodiment, the functional derivative of a protein subunit of a complex encompassed by the present invention is capable of forming a complex encompassed by the present invention, i.e., the derivative can still bind to at least one other protein subunit to form a complex encompassed by the present invention.

[0446] In certain embodiments encompassed by the present invention, at least two subunits of a complex encompassed by the present invention are linked to each other via at least one covalent bond. A covalent bond between subunits of a complex encompassed by the present invention increases the stability of the complex encompassed by the present invention because it prevents the dissociation of the subunits. Any method known to the skilled artisan can be used to achieve a covalent bond between at least two subunits encompassed by the present invention.

[0447] In specific embodiments, covalent cross-links are introduced between adjacent subunits. Such cross-links can be between the side chains of amino acids at opposing sides of the dimer interface. Any functional groups of amino acid residues at the dimer interface in combination with suitable cross-linking agents can be used to create covalent bonds between the protein subunits at the dimer interface. Existing amino acids at the dimer interface can be used or, alternatively, suitable amino acids can be introduced by site-directed mutagenesis.

[0448] In exemplary embodiments, cysteine residues at opposing sides of the dimer interface are oxidized to form disulfide bonds. See, e.g., Reznik et al., (1996) Nat Bio Technol 14:1007-1011, at page 1008. 1,3-dibromoacetone can also be used to create an irreversible covalent bond between two sulfhydryl groups at the dimer interface. In certain other embodiments, lysine residues at the dimer inter face are used to create a covalent bond between the protein subunits of the complex. Crosslinkers that can be used to create covalent bonds between the epsilon amino groups of lysine residues are, e.g., but are not limited to, bis(sulfosuccinimidyl)suberate; dimethyladipimidate-2HD1; disuccinimidyl glutarate; N-hydroxysuccinimidyl 2,3-dibromoproprionate.

[0449] In other specific embodiments, two or more interacting subunits, or homologues, derivatives or fragments thereof, are directly fused together, or covalently linked together through a peptide linker, forming a hybrid protein having a single unbranched polypeptide chain. Thus, the protein complex may be formed by “intramolecular interactions between two portions of the hybrid protein. In still another embodiment, at least one of the fused or linked interacting subunit in this protein complex is a homologue, derivative or fragment of a native protein.

[0450] In specific embodiments, at least one subunit, or a homologue, derivative or fragment thereof, may be expressed as fusion or chimeric protein comprising the subunit, homologue, derivative or fragment, joined via a peptide bond to a heterologous amino acid sequence.

[0451] As used herein, a “chimeric protein” or “fusion protein” comprises all or part (preferably a biologically active part) of a polypeptide corresponding to a subunit or a fragment, homologue or derivative thereof, operably linked to a heterologous polypeptide (i.e., a polypeptide other than the polypeptide corresponding to the subunit or a fragment, homologue or derivative thereof). Within the fusion protein, the term “operably linked” is intended to indicate that the polypeptide encompassed by the present invention and the heterologous polypeptide are fused in-frame to each other. The heterologous polypeptide can be fused to the amino-terminus or the carboxyl-terminus of the polypeptide encompassed by the present invention.

[0452] In one embodiment, the heterologous amino acid sequence comprises an affinity tag that can be used for affinity purification. In another embodiment, the heterologous amino acid sequence includes a fluorescent label. In still another embodiment, the fusion protein contains a heterologous signal sequence, immunoglobulin fusion protein, toxin, or other useful protein sequences.

[0453] A variety of peptide tags known in the art may be used to generate fusion proteins of the protein subunits of a complex encompassed by the present invention, such as but not limited to the immunoglobulin constant regions, polyhistidine sequence (Petty, 1996, Metal-chelate affinity chromatography, in Current Protocols in Molecular Biology, Vol. 2, Ed. Ausubel et al., Greene Publish. Assoc. & Wiley Interscience), glutathione S-transferase (GST: Smith, 1993, Methods Mol. Cell Bio. 4:220-229), the E. coli maltose binding protein (Guanetal., 1987, Gene 67:21-30), and various cellulose binding domains (U. S. Pat. Nos. 5,496,934: 5,202,247; 5,137,819; Tomme et al., 1994, Protein Eng. 7:117-123), etc.

[0454] One possible peptide tags are short amino acid sequences to which monoclonal antibodies are available, such as but not limited to the following well known examples, the FLAG epitope, the myc epitope at amino acids 408-439, the influenza virus hemaglutinin (HA) epitope. Other peptide tags are recognized by specific binding partners and thus facilitate isolation by affinity binding to the binding partner, which is preferably immobilized and/or on a solid support. As will be appreciated by those skilled in the art, many methods can be used to obtain the coding region of the above-mentioned peptide tags, including but not limited to, DNA cloning, DNA amplification, and synthetic methods. Some of the peptide tags and reagents for their detection and isolation are available commercially.

[0455] In certain embodiments, a combination of different peptide tags is used for the purification of the protein subunits of a complex encompassed by the present invention or for the purification of a complex. In certain embodiments, at least one subunit has at least two peptide tags, e.g., a FLAG tag and a His tag. The different tags can be fused together or can be fused in different positions to the protein subunit. In the purification procedure, the different peptide tags are used subsequently or concurrently for purification. In certain embodiments, at least two different subunits are fused to a peptide tag, wherein the peptide tags of the two subunits can be identical or different. Using different tagged subunits for the purification of the complex ensures that only complex will be purified and minimizes the amount of uncomplexed protein subunits, such as monomers or homodimers.

[0456] Various leader sequences known in the art can be used for the efficient secretion of a protein subunit of a complex encompassed by the present invention from bacterial and mammalian cells (von Heijne, 1985, J. Mol. Biol. 184:99-105). Leader peptides are selected based on the intended host cell, and may include bacterial, yeast, viral, animal, and mammalian sequences. For example, the herpes virus glycoprotein D leader peptide is suitable for use in a variety of mammalian cells. A preferred leader peptide for use in mammalian cells can be obtained from the V-J2-C region of the mouse immunoglobulin kappa chain (Bernard et al., 1981. Proc. Natl. Acad. Sci. 78:5812-5816).

[0457] DNA sequences encoding desired peptide tag or leader peptide which are known or readily available from libraries or commercial suppliers are suitable in the practice of this invention.

[0458] In certain embodiments, the protein subunits of a complex encompassed by the present invention are derived from the same species. In more specific embodiments, the protein subunits are all derived from human. In another specific embodiment, the protein subunits are all derived from a mammal.

[0459] In certain other embodiments, the protein subunits of a complex encompassed by the present invention are derived from a non-human species, such as, but not limited to, cow, pig, horse, cat, dog, rat, mouse, a primate (e.g., a chimpanzee, a monkey Such as a cynomolgous monkey). In certain embodiments, one or more subunits are derived from human and the other subunits are derived from a mammal other than a human to give rise to chimeric complexes.

[0460] Included within the scope encompassed by the present invention is an isolated modified protein complex in which the subunits, or homologs, derivatives, or fragments thereof, are differentially modified during or after translation, e.g., by glycosylation, acetylation, phosphorylation, amidation, derivatization by known protecting/blocking groups, proteolytic cleavage, linkage to an antibody molecule or other cellular ligand, etc. Any of numerous chemical modifications may be carried out by known techniques, including but not limited to specific chemical cleavage by cyanogen bromide, trypsin, chymotrypsin, papain, V8 protease, NaBH4, acetylation, formylation, oxidation, reduction, metabolic synthesis in the presence of tunicamycin, etc. In still another embodiment, the protein sequences are modified to have a heterofunctional reagent; such heterofunctional reagents can be used to crosslink the members of the complex.

[0461] The protein complexes encompassed by the present invention can also be in a modified form. For example, an antibody selectively immunoreactive with the protein complex can be bound to the protein complex. In another example, a non-antibody modulator capable of enhancing the interaction between the interacting partners in the protein complex may be included.

[0462] The above-described protein complexes may further include any additional components, e.g., other proteins, nucleic acids, lipid molecules, monosaccharides or polysaccharides, ions, etc.

TABLE 3

| Protein complex | Subunits of the protein complex |
|---|---|
| SS18-SSX | Subunit_1: SMARCC1 or SMARCC2 |
| BAF-NCP complex | Subunit_2: SMARCC1 or SMARCC2 |
| | Subunit_3: SMARCD1, SMARCD2, or SMARCD3 |
| | Subunit_4: SS18-SSX fusion protein |
| | Subunit_5: SMARCE1 |
| | Subunit_6: ARID1A or ARID1B |
| | Subunit_7: DPF1, DPF2, or DPF3 |
| | Subunit_8: ACTL6A |
| | Subunit_9: β-Actin |
| | Subunit_10: BCL7A, BCL7B, or BCL7C |
| | Subunit_11: SMARCA2 or SMARCA4 |
| | Subunit_12: H2A (with K119 Ub) |
| | Subunit_13: H2B |
| | Subunit_14: H3 |
| | Subunit_15: H4 |

### X. Pharmaceutical Compositions

[0463] In another aspect, the present invention provides pharmaceutically acceptable compositions which comprise a therapeutically-effective amount of an agent that inhibits binding of a SS18-SSX fusion protein to an H2A K119Ub-marked nucleosome, formulated together with one or more pharmaceutically acceptable carriers (additives) and/or diluents.

[0464] As described in detail below, the pharmaceutical compositions of the present invention may be specially formulated for administration in solid or liquid form, including those adapted for the following: (1) oral administration, for example, drenches (aqueous or non-aqueous solutions or suspensions), tablets, boluses, powders, granules, pastes; (2) parenteral administration, for example, by subcutaneous, intramuscular or intravenous injection as, for example, a sterile solution or suspension; (3) topical application, for example, as a cream, ointment or spray applied to the skin; (4) intravaginally or intrarectally, for example, as a pessary, cream or foam; or (5) aerosol, for example, as an aqueous aerosol, liposomal preparation or solid particles containing the compound.

[0465] The phrase “therapeutically-effective amount” as used herein means that amount of an agent that modulates (e.g., inhibits) biomarker expression and/or activity which is effective for producing some desired therapeutic effect, e.g., cancer treatment, at a reasonable benefit/risk ratio.

[0466] The phrase “pharmaceutically acceptable” is employed herein to refer to those agents, materials, compositions, and/or dosage forms which are, within the scope of sound medical judgment, suitable for use in contact with the tissues of human beings and animals without excessive toxicity, irritation, allergic response, or other problem or complication, commensurate with a reasonable benefit/risk ratio.

[0467] The phrase “pharmaceutically-acceptable carrier” as used herein means a pharmaceutically-acceptable material, composition or vehicle, such as a liquid or solid filler, diluent, excipient, solvent or encapsulating material, involved in carrying or transporting the subject chemical from one organ, or portion of the body, to another organ, or portion of the body. Each carrier must be “acceptable” in the sense of being compatible with the other ingredients of the formulation and not injurious to the subject. Some examples of materials which can serve as pharmaceutically-acceptable carriers include: (1) sugars, such as lactose, glucose and sucrose; (2) starches, such as corn starch and potato starch; (3) cellulose, and its derivatives, such as sodium carboxymethyl cellulose, ethyl cellulose and cellulose acetate; (4) powdered tragacanth; (5) malt; (6) gelatin; (7) talc; (8) excipients, such as cocoa butter and suppository waxes; (9) oils, such as peanut oil, cottonseed oil, safflower oil, sesame oil, olive oil, corn oil and soybean oil; (10) glycols, such as propylene glycol; (11) polyols, such as glycerin, sorbitol, mannitol and polyethylene glycol; (12) esters, such as ethyl oleate and ethyl laurate; (13) agar; (14) buffering agents, such as magnesium hydroxide and aluminum hydroxide; (15) alginic acid; (16) pyrogen-free water; (17) isotonic saline; (18) Ringer's solution; (19) ethyl alcohol; (20) phosphate buffer solutions; and (21) other non-toxic compatible substances employed in pharmaceutical formulations.

[0468] The term “pharmaceutically-acceptable salts” refers to the relatively non-toxic, inorganic and organic acid addition salts of the agents that modulates (e.g., inhibits) biomarker expression and/or activity. These salts can be prepared in situ during the final isolation and purification of the respiration uncoupling agents, or by separately reacting a purified respiration uncoupling agent in its free base form with a suitable organic or inorganic acid, and isolating the salt thus formed. Representative salts include the hydrobromide, hydrochloride, sulfate, bisulfate, phosphate, nitrate, acetate, valerate, oleate, palmitate, stearate, laurate, benzoate, lactate, phosphate, tosylate, citrate, maleate, fumarate, succinate, tartrate, napthylate, mesylate, glucoheptonate, lactobionate, and laurylsulphonate salts and the like (See, for example, Berge et al. (1977) “Pharmaceutical Salts”, J. Pharm. Sci. 66:1-19).

[0469] In other cases, the agents useful in the methods of the present invention may contain one or more acidic functional groups and, thus, are capable of forming pharmaceutically-acceptable salts with pharmaceutically-acceptable bases. The term “pharmaceutically-acceptable salts” in these instances refers to the relatively non-toxic, inorganic and organic base addition salts of agents that modulates (e.g., inhibits) biomarker expression. These salts can likewise be prepared in situ during the final isolation and purification of the respiration uncoupling agents, or by separately reacting the purified respiration uncoupling agent in its free acid form with a suitable base, such as the hydroxide, carbonate or bicarbonate of a pharmaceutically-acceptable metal cation, with ammonia, or with a pharmaceutically-acceptable organic primary, secondary or tertiary amine. Representative alkali or alkaline earth salts include the lithium, sodium, potassium, calcium, magnesium, and aluminum salts and the like. Representative organic amines useful for the formation of base addition salts include ethylamine, diethylamine, ethylenediamine, ethanolamine, diethanolamine, piperazine and the like (see, for example, Berge et al., supra).

[0470] Wetting agents, emulsifiers and lubricants, such as sodium lauryl sulfate and magnesium stearate, as well as coloring agents, release agents, coating agents, sweetening, flavoring and perfuming agents, preservatives and antioxidants can also be present in the compositions.

[0471] Examples of pharmaceutically-acceptable antioxidants include: (1) water soluble antioxidants, such as ascorbic acid, cysteine hydrochloride, sodium bisulfate, sodium metabisulfite, sodium sulfite and the like; (2) oil-soluble antioxidants, such as ascorbyl palmitate, butylated hydroxyanisole (BHA), butylated hydroxytoluene (BHT), lecithin, propyl gallate, alpha-tocopherol, and the like; and (3) metal chelating agents, such as citric acid, ethylenediamine tetraacetic acid (EDTA), sorbitol, tartaric acid, phosphoric acid, and the like.

[0472] Formulations useful in the methods of the present invention include those suitable for oral, nasal, topical (including buccal and sublingual), rectal, vaginal, aerosol and/or parenteral administration. The formulations may conveniently be presented in unit dosage form and may be prepared by any methods well-known in the art of pharmacy. The amount of active ingredient which can be combined with a carrier material to produce a single dosage form will vary depending upon the host being treated, the particular mode of administration. The amount of active ingredient, which can be combined with a carrier material to produce a single dosage form will generally be that amount of the compound which produces a therapeutic effect. Generally, out of one hundred percent, this amount will range from about 1 percent to about ninety-nine percent of active ingredient, preferably from about 5 percent to about 70 percent, most preferably from about 10 percent to about 30 percent.

[0473] Methods of preparing these formulations or compositions include the step of bringing into association an agent that modulates (e.g., inhibits) biomarker expression and/or activity, with the carrier and, optionally, one or more accessory ingredients. In general, the formulations are prepared by uniformly and intimately bringing into association a respiration uncoupling agent with liquid carriers, or finely divided solid carriers, or both, and then, if necessary, shaping the product.

[0474] Formulations suitable for oral administration may be in the form of capsules, cachets, pills, tablets, lozenges (using a flavored basis, usually sucrose and acacia or tragacanth), powders, granules, or as a solution or a suspension in an aqueous or non-aqueous liquid, or as an oil-in-water or water-in-oil liquid emulsion, or as an elixir or syrup, or as pastilles (using an inert base, such as gelatin and glycerin, or sucrose and acacia) and/or as mouth washes and the like, each containing a predetermined amount of a respiration uncoupling agent as an active ingredient. A compound may also be administered as a bolus, electuary or paste.

[0475] In solid dosage forms for oral administration (capsules, tablets, pills, dragees, powders, granules and the like), the active ingredient is mixed with one or more pharmaceutically-acceptable carriers, such as sodium citrate or dicalcium phosphate, and/or any of the following: (1) fillers or extenders, such as starches, lactose, sucrose, glucose, mannitol, and/or silicic acid; (2) binders, such as, for example, carboxymethylcellulose, alginates, gelatin, polyvinyl pyrrolidone, sucrose and/or acacia; (3) humectants, such as glycerol; (4) disintegrating agents, such as agar-agar, calcium carbonate, potato or tapioca starch, alginic acid, certain silicates, and sodium carbonate; (5) solution retarding agents, such as paraffin; (6) absorption accelerators, such as quaternary ammonium compounds; (7) wetting agents, such as, for example, acetyl alcohol and glycerol monostearate; (8) absorbents, such as kaolin and bentonite clay; (9) lubricants, such a talc, calcium stearate, magnesium stearate, solid polyethylene glycols, sodium lauryl sulfate, and mixtures thereof; and (10) coloring agents. In the case of capsules, tablets and pills, the pharmaceutical compositions may also comprise buffering agents. Solid compositions of a similar type may also be employed as fillers in soft and hard-filled gelatin capsules using such excipients as lactose or milk sugars, as well as high molecular weight polyethylene glycols and the like.

[0476] A tablet may be made by compression or molding, optionally with one or more accessory ingredients. Compressed tablets may be prepared using binder (for example, gelatin or hydroxypropylmethyl cellulose), lubricant, inert diluent, preservative, disintegrant (for example, sodium starch glycolate or cross-linked sodium carboxymethyl cellulose), surface-active or dispersing agent. Molded tablets may be made by molding in a suitable machine a mixture of the powdered peptide or peptidomimetic moistened with an inert liquid diluent.

[0477] Tablets, and other solid dosage forms, such as dragees, capsules, pills and granules, may optionally be scored or prepared with coatings and shells, such as enteric coatings and other coatings well-known in the pharmaceutical-formulating art. They may also be formulated so as to provide slow or controlled release of the active ingredient therein using, for example, hydroxypropylmethyl cellulose in varying proportions to provide the desired release profile, other polymer matrices, liposomes and/or microspheres. They may be sterilized by, for example, filtration through a bacteria-retaining filter, or by incorporating sterilizing agents in the form of sterile solid compositions, which can be dissolved in sterile water, or some other sterile injectable medium immediately before use. These compositions may also optionally contain opacifying agents and may be of a composition that they release the active ingredient(s) only, or preferentially, in a certain portion of the gastrointestinal tract, optionally, in a delayed manner. Examples of embedding compositions, which can be used include polymeric substances and waxes. The active ingredient can also be in micro-encapsulated form, if appropriate, with one or more of the above-described excipients.

[0478] Liquid dosage forms for oral administration include pharmaceutically acceptable emulsions, microemulsions, solutions, suspensions, syrups and elixirs. In addition to the active ingredient, the liquid dosage forms may contain inert diluents commonly used in the art, such as, for example, water or other solvents, solubilizing agents and emulsifiers, such as ethyl alcohol, isopropyl alcohol, ethyl carbonate, ethyl acetate, benzyl alcohol, benzyl benzoate, propylene glycol, 1,3-butylene glycol, oils (in particular, cottonseed, groundnut, corn, germ, olive, castor and sesame oils), glycerol, tetrahydrofuryl alcohol, polyethylene glycols and fatty acid esters of sorbitan, and mixtures thereof.

[0479] Besides inert diluents, the oral compositions can also include adjuvants such as wetting agents, emulsifying and suspending agents, sweetening, flavoring, coloring, perfuming and preservative agents.

[0480] Suspensions, in addition to the active agent may contain suspending agents as, for example, ethoxylated isostearyl alcohols, polyoxyethylene sorbitol and sorbitan esters, microcrystalline cellulose, aluminum metahydroxide, bentonite, agar-agar and tragacanth, and mixtures thereof.

[0481] Formulations for rectal or vaginal administration may be presented as a suppository, which may be prepared by mixing one or more respiration uncoupling agents with one or more suitable nonirritating excipients or carriers comprising, for example, cocoa butter, polyethylene glycol, a suppository wax or a salicylate, and which is solid at room temperature, but liquid at body temperature and, therefore, will melt in the rectum or vaginal cavity and release the active agent.

[0482] Formulations which are suitable for vaginal administration also include pessaries, tampons, creams, gels, pastes, foams or spray formulations containing such carriers as are known in the art to be appropriate.

[0483] Dosage forms for the topical or transdermal administration of an agent that modulates (e.g., inhibits) biomarker expression and/or activity include powders, sprays, ointments, pastes, creams, lotions, gels, solutions, patches and inhalants. The active component may be mixed under sterile conditions with a pharmaceutically-acceptable carrier, and with any preservatives, buffers, or propellants which may be required.

[0484] The ointments, pastes, creams and gels may contain, in addition to a respiration uncoupling agent, excipients, such as animal and vegetable fats, oils, waxes, paraffins, starch, tragacanth, cellulose derivatives, polyethylene glycols, silicones, bentonites, silicic acid, talc and zinc oxide, or mixtures thereof.

[0485] Powders and sprays can contain, in addition to an agent that modulates (e.g., inhibits) biomarker expression and/or activity, excipients such as lactose, talc, silicic acid, aluminum hydroxide, calcium silicates and polyamide powder, or mixtures of these substances. Sprays can additionally contain customary propellants, such as chlorofluorohydrocarbons and volatile unsubstituted hydrocarbons, such as butane and propane.

[0486] The agent that modulates (e.g., inhibits) biomarker expression and/or activity, can be alternatively administered by aerosol. This is accomplished by preparing an aqueous aerosol, liposomal preparation or solid particles containing the compound. A nonaqueous (e.g., fluorocarbon propellant) suspension could be used. Sonic nebulizers are preferred because they minimize exposing the agent to shear, which can result in degradation of the compound.

[0487] Ordinarily, an aqueous aerosol is made by formulating an aqueous solution or suspension of the agent together with conventional pharmaceutically acceptable carriers and stabilizers. The carriers and stabilizers vary with the requirements of the particular compound, but typically include nonionic surfactants (Tweens, Pluronics, or polyethylene glycol), innocuous proteins like serum albumin, sorbitan esters, oleic acid, lecithin, amino acids such as glycine, buffers, salts, sugars or sugar alcohols. Aerosols generally are prepared from isotonic solutions.

[0488] Transdermal patches have the added advantage of providing controlled delivery of a respiration uncoupling agent to the body. Such dosage forms can be made by dissolving or dispersing the agent in the proper medium. Absorption enhancers can also be used to increase the flux of the peptidomimetic across the skin. The rate of such flux can be controlled by either providing a rate controlling membrane or dispersing the peptidomimetic in a polymer matrix or gel.

[0489] Ophthalmic formulations, eye ointments, powders, solutions and the like, are also contemplated as being within the scope of this invention.

[0490] Pharmaceutical compositions of this invention suitable for parenteral administration comprise one or more respiration uncoupling agents in combination with one or more pharmaceutically-acceptable sterile isotonic aqueous or nonaqueous solutions, dispersions, suspensions or emulsions, or sterile powders which may be reconstituted into sterile injectable solutions or dispersions just prior to use, which may contain antioxidants, buffers, bacteriostats, solutes which render the formulation isotonic with the blood of the intended recipient or suspending or thickening agents.

[0491] Examples of suitable aqueous and nonaqueous carriers which may be employed in the pharmaceutical compositions encompassed by the present invention include water, ethanol, polyols (such as glycerol, propylene glycol, polyethylene glycol, and the like), and suitable mixtures thereof, vegetable oils, such as olive oil, and injectable organic esters, such as ethyl oleate. Proper fluidity can be maintained, for example, by the use of coating materials, such as lecithin, by the maintenance of the required particle size in the case of dispersions, and by the use of surfactants.

[0492] These compositions may also contain adjuvants such as preservatives, wetting agents, emulsifying agents and dispersing agents. Prevention of the action of microorganisms may be ensured by the inclusion of various antibacterial and antifungal agents, for example, paraben, chlorobutanol, phenol sorbic acid, and the like. It may also be desirable to include isotonic agents, such as sugars, sodium chloride, and the like into the compositions. In addition, prolonged absorption of the injectable pharmaceutical form may be brought about by the inclusion of agents which delay absorption such as aluminum monostearate and gelatin.

[0493] In some cases, in order to prolong the effect of a drug, it is desirable to slow the absorption of the drug from subcutaneous or intramuscular injection. This may be accomplished by the use of a liquid suspension of crystalline or amorphous material having poor water solubility. The rate of absorption of the drug then depends upon its rate of dissolution, which, in turn, may depend upon crystal size and crystalline form. Alternatively, delayed absorption of a parenterally-administered drug form is accomplished by dissolving or suspending the drug in an oil vehicle.

[0494] Injectable depot forms are made by forming microencapsule matrices of an agent that modulates (e.g., inhibits) biomarker expression and/or activity, in biodegradable polymers such as polylactide-polyglycolide. Depending on the ratio of drug to polymer, and the nature of the particular polymer employed, the rate of drug release can be controlled. Examples of other biodegradable polymers include poly(orthoesters) and poly(anhydrides). Depot injectable formulations are also prepared by entrapping the drug in liposomes or microemulsions, which are compatible with body tissue.

[0495] When the respiration uncoupling agents of the present invention are administered as pharmaceuticals, to humans and animals, they can be given per se or as a pharmaceutical composition containing, for example, 0.1 to 99.5% (more preferably, 0.5 to 90%) of active ingredient in combination with a pharmaceutically acceptable carrier.

[0496] Actual dosage levels of the active ingredients in the pharmaceutical compositions of this invention may be determined by the methods of the present invention so as to obtain an amount of the active ingredient, which is effective to achieve the desired therapeutic response for a particular subject, composition, and mode of administration, without being toxic to the subject.

[0497] The nucleic acid molecules encompassed by the present invention can be inserted into vectors and used as gene therapy vectors. Gene therapy vectors can be delivered to a subject by, for example, intravenous injection, local administration (see U.S. Pat. No. 5,328,470) or by stereotactic injection (see e.g., Chen et al. (1994) Proc. Natl. Acad. Sci. USA 91:3054 3057). The pharmaceutical preparation of the gene therapy vector can include the gene therapy vector in an acceptable diluent, or can comprise a slow release matrix in which the gene delivery vehicle is imbedded. Alternatively, where the complete gene delivery vector can be produced intact from recombinant cells, e.g., retroviral vectors, the pharmaceutical preparation can include one or more cells which produce the gene delivery system.

[0498] The present invention also encompasses kits for detecting and/or modulating biomarkers described herein. A kit of the present invention may also include instructional materials disclosing or describing the use of the kit or an antibody of the disclosed invention in a method of the disclosed invention as provided herein. A kit may also include additional components to facilitate the particular application for which the kit is designed. For example, a kit may additionally contain means of detecting the label (e.g., enzyme substrates for enzymatic labels, filter sets to detect fluorescent labels, appropriate secondary labels such as a sheep anti-mouse-HRP, etc.) and reagents necessary for controls (e.g., control biological samples or standards). A kit may additionally include buffers and other reagents recognized for use in a method of the disclosed invention. Non-limiting examples include agents to reduce non-specific binding, such as a carrier protein or a detergent.

[0499] Other embodiments of the present invention are described in the following Examples. The present invention is further illustrated by the following examples which should not be construed as further limiting.

### EXAMPLES

### Example 1: Materials and Methods for Examples 2-5

a. Cell Lines and Cell Culture

[0500] The two synovial sarcoma cell lines, Aska and SYO1, were generous gifts from Kazuyuki Itoh, Norifumi Naka, and Satoshi Takenaka (Osaka University, Japan) and Akira Kawai (National Cancer Center Hospital, Japan), respectively. The CRL7250 human fibroblast cell line was obtained from Drs. Berkeley Gryder and Javed Khan (National Cancer Institute, Bethesda, MD). The HEK293T cell line was purchased ATCC (CRL-3216). Each cell line was cultured using standard protocols in DMEM medium (Gibco) supplemented with 10-20% fetal bovine serum, 1% Glutamax (Gibco), 1% Sodium Pyruvate (Gibco) and 1% Penicillin-Streptomycin (Gibco) and grown in a humidified incubator at 37° C. with 5% CO₂.

b. Stable Gene Expression and shRNA Knockdown Constructs

[0501] Constitutive expression of SS18 wild-type (SS18), SS18-SSX1 (SS18-SSX1) and SS18-SSX1 mutations with HA or V5 N-terminus tag was obtained using an EF1alpha-driven expression vector (modified from Clonetech, dual Promoter EF-1a-MCS-PGK-Puro or EF-la-MCS-PGK-Blast) expressed in cells by lentiviral infection and selected with puromycin (2 μg/mL) or blasticidin (10 μg/mL). Constitutive expression of shRNA hairpins targeting the 3′UTR region of SSX of the SS18-SSX fusion (5′-CAGTCACTGACAGTTAATAAA-3′ (SEQ ID NO: 227)) or a scramble non-targeting control (5′-CCTAAGGTTAAGTCGCCCTCGCTCGAGCGAGGGCGACTTAACCTTAGG-3′ (SEQ ID NO: 228)) was obtained using lentiviral infection of the pLKO.1 vector with puromycin (2 μg/mL) selection.

c. Lentivirus Generation and Harvesting

[0502] Lentivirus production was obtained from PEI (Polysciences) transfection of HEK293T LentiX™ cells (Clontech) with co-transfection of the packaging vectors pspax2 and pMD2.G along with the gene delivery vector. Viral supernatants were collected 72 hours after transfection, underwent ultracentrifugation at 20,000 rpm for 2.5 hr at 4° C. to concentrate, and then virus pellets were resuspended in PBS. For infection, the viral pellets were added to cells in a drop wise manner in the presence of polybrene (10 μg/mL). After 48 hours, the media containing the lentivirus was replaced and infected cells were selected by addition of puromycin (2 μg/mL) or blasticidin (10 μg/mL).

d. Western Blot Analysis

[0503] Detection of proteins by western blot (WB) analysis was achieved using standard protocols with primary antibodies (Table 4). Samples were separated on 4-12% Bis-Tris SDS PAGE gel (Invitrogen) and transferred to PVDF membrane. The membranes were then blocked in 5% milk and incubated with primary antibody in PBST over night at 4° C. Following incubation with the primary antibody, membranes were washed 3× in PBST, incubated with IRDye® (LI-COR Biosciences) secondary antibodies for 3 hours, washed 3× in PBST with a final PBS wash, and then visualized by the LI-COR Odyssey® Imaging System (LI-COR Biosciences).

TABLE 4
Description and characterization of antibodies used herein.

| Protein | Clone | Lot # | Catelog ID | Supplier | Application |
|---|---|---|---|---|---|
| BRG1 | G-7 | G0115 | sc-17796 | Santa Cruz | Immunoblotting |
| BRG1 | D1Q7F | 1 | 49360S | Cell Signaling Technology | Immunoprecipitation |
| SMARCB1/BAF47 | A-5 | K0515 | sc-166165 | Santa Cruz | Immunoblotting |
| SMARCC1/BAF155 | H-76 | | sc-10756 | Cell Signaling Technology | Immunoblotting |
| SS18 | D6I4Z | 1 | 21792S | Cell Signaling Technology | Immunoblotting & ChIP |
| RING1B | D22F2 | | 5694 | Cell Signaling Technology | Immunoblotting & ChIP |
| H2AK119Ub | D27C4 | | 8240 | Cell Signaling Technology | Immunoblotting & ChIP |
| H3 | | GR135489-1 | ab1791 | Abcam | Immunoblotting |
| GAPDH | G-9 | K2316 | sc-365062 | Santa Cruz | Immunoblotting |
| V5 tag | | 1805125 | P/N-46-0705 | Thermo Fisher Scientific | Immunoblotting |
| V5 tag | D3H8Q | 4 | 13202S | Cell Signaling Technology | ChIP |
| GFP | | | A-11120 | Thermo Fisher Scientific | Immunoblotting |
| GST | | | G7781 | Sigma-Aldrich | Immunoblotting |
| HA | | | Ab9110 | Abcam | Immunoblotting |
| MBP | | | E8032 | New England Biolabs | Immunoblotting |

e. Cell Lysate Collection

[0504] Whole cell extractions (WCE) were obtained by washing harvested cell pellets with PBS pH 7.4, resuspending in whole cell lysis buffer (PBS pH 7.4 and 1% SDS) and then heating for three minutes at 95° C. Lysates were sonicated until fully liquid. Nuclear extractions (NE) were obtained by suspending the harvested cells in Buffer 0 (50 mM Tris pH 7.5, 0.1% NP-40, 1 mM EDTA, 1 mM MgCl2 with protease inhibitor (Roche, C756U27), 1 mM DTT and 1 mM phenylmethylsulfonyl fluoride (PMSF)), centrifuging at 5,000 rpm for 5 minutes at 4° C., and discarding the supernatant. The pellet (nuclei) were resuspended in EB300 (50 mM Tris pH 7.5, 0.1% NP-40, 1 mM EDTA, 1 mM MgCl2, 300 mM NaCl with protease inhibitor cocktail (Roche, C756U27), 1 mM DTT and 1 mM phenylmethylsulfonyl fluoride (PMSF)), vortexed, incubated on ice, centrifuged at 15,000 rpm for 10 minutes at 4° C. and supernatant containing the nuclear extract collected.

f. Co-Immunoprecipitations

[0505] Nuclear extracts were quantified by Bradford assay and 150-200 μg of protein was incubated with 2 μg of antibody in Buffer EB300 (50 mM Tris pH 7.5, 0.1% NP-40, 1 mM EDTA, 1 mM MgCl2, 150 mM NaCl with protease inhibitor (Roche, C756U27), 1 mM DTT and 1 mM phenylmethylsulfonyl fluoride (PMSF)) overnight at 4° C. Each sample was then incubated with Protein G Dynabeads® (Thermo Scientific) for 2-3 hours. Beads were washed three times with Buffer EB300 followed by elution with 20 μL of elution buffer (NuPage™ LDS buffer (2×) (Life Technologies) containing 100 mM DTT and water).

g. Cell Proliferation Assay

[0506] To measure cell proliferation following lentiviral infection, 2.5×10⁴ cells per well were seeded in 12-well plates following 48-hour exposure to lentivirus and 5-day selection with puromycin or blasticidin, with Day 7 denoting the day cells were plated after infection and selection. The cell viability in three wells was then measured using a Vi-CELL™ Cell Counter (Beckman, Brea, CA) every 72 hours.

h. Differential Salt Extraction

[0507] Following collection of 5.0×10⁷ cells, cells were resuspended in elution 0 buffer (50 mM Tris-HCl pH 7.5, 1 mM EDTA, 0.1% NP40 with protease inhibitor mixture (Roche, C756U27) and 1 mM PMSF), incubated on ice for 5 minutes, and pelleted by centrifugation. The supernatant was collected (0 mM fraction), and the cell pellet was resuspended in elution 150 buffer (50 mM Tris-HCl pH 7.5, 150 mM NaCl) 1 mM EDTA, 0.1% NP40 with protease inhibitor mixture (Roche, C756U27) and 1 mM PMSF) and vortexed. This process was repeated sequentially with elution 300 buffer, elution 500 buffer, and elution 1000 buffer that contained increasing concentrations of NaCl in order to obtain 0, 150, 300, 500, and 1,000 mM NaCl soluble fractions. Each of these soluble fractions, along with a total sample (5×10⁶ cells in elution buffer) and the chromatin pellet (non-soluble material remaining following extraction with 1000 mM NaCl) fractions, was denatured in SDS to a final concentration of 1%, protein quantified by Pierce™ BCA Protein Assay Kit (Thermo Fisher Scientific), and analyzed (1.5 μg of protein) by immunoblot.

i. Purification of mSWI/SNF (BAF) Complexes

[0508] Stable HEK293T cell lines expressing by lentiviral infection HA-SS18 WT or HA-SS18-SSX1 were grown in 150 mm dishes. Complexes were purified using methods previously described with a few modifications (Mashtalir et al. (2014) Mol. Cell 54:392-406). Confluent plates were scraped to remove cells and cells were washed with PBS. Cell suspension was spun down by centrifugation at 3000 rpm for 5 minutes at 4° C. and pellets were resuspended in hypotonic buffer (10 mM Tris HCl pH 7.5, 10 mM KCl, 1.5 mM MgCL2, 1 mM DTT, 1 mM PMSF) and incubated on ice for 5 minutes. Following incubation, cell suspension was spun down by centrifugation at 5000 rpm for 5 minutes at 4° C., and pellets were resuspended in 5× volume of fresh hypotonic buffer (with protease inhibitor cocktail, Roche C756U27) and then cells were homogenized using a Dounce homogenizer (glass). Cell suspension was layered onto hypotonic buffer sucrose cushion made with 30% sucrose w/v, spun down by centrifugation at 5000 rpm for 1 hour at 4° C. followed by removal of the cytosol-containing layer. The nuclei containing pellets were resuspended in high salt buffer (50 mM Tris HCl pH 7.5, 300 mM KCl, 1 mM MgCL2, 1 mM EDTA, 1 mM, 1% NP40, 1 mM DTT, 1 mM PMSF and protease inhibitor cocktail) and then the homogenate rotated for 1 hour at 4° C. Homogenates were then spun down by centrifugation at 20,000 rpm for 1 hour at 4° C. in a SW32Ti rotor (Beckman Coulter). The soluble proteins, consisting of the nuclear extract (NE) fraction, was separated from the insoluble chromatin pellet, consisting of the chromatin (CHR) fraction. The chromatin pellet was further solubilized by treatment with Benzonase® (Sigma Aldrich) for 30 minutes and subsequently additional KCl was added to final concentration of 700 mM (50 mM Tris HCl pH 7.5, 700 mM KCl, 1 mM MgCL2, 1 mM EDTA, 1 mM, 1% NP40, 1 mM DTT, 1 mM PMSF and protease inhibitor cocktail), and sonicated 3 times for 30 seconds with 5-minute intervals. The solubilized chromatin fraction was then spun down by centrifugation at 20,000 rpm for 1 hour at 4° C. in a SW32Ti rotor (Beckman Coulter) and supernatant was collected. The collected nuclear extract and chromatin fractions were filtered with a 0.45 μm filter and rotated overnight at 4° C. with HA magnetic resin. HA beads were washed in high salt buffer and eluted with 1 mg/mL of HA peptide for 4 times at durations of 1.5 hour each. Eluted proteins were then subjected to density gradient centrifugation or dialysis.

### J. Colloidal Blue and Silver Stain

[0509] HA-SS18 WT and HA-SS18-SSX1 mSWI/SNF complexes were purified via HA-epitope-dependent complex purification. Importantly, for FIG. 1A, the same number of cells were used for both HA-SS18 WT and HA-SS18-SSX expressing cells, and nuclear material from both cell lines was split into NE and CHR fractions, representing an equal total amount of complexes in the nucleus. Hence, equal input/output loading by volume was achieved. Samples were run on a 4-12% Bis-Tris SDS PAGE gel, stained using Colloidal blue kit or SilverQuest™ Silver Staining Kit (Invitrogen), and imaged using LI-COR Odyssey® Imaging System (LI-COR Biosciences) or Epson-Perfection V600 Photo scanner, respectibly.

k. Density Sedimentation Gradients

[0510] Purified protein complexes were added to the top of a linear, 11 ml 10%-30% glycerol gradients containing 25 mM HEPES pH 7.9, 0.1 mM EDTA, 12.5 mM MgCl2, 100 mM KCl with 1 mM DTT and protease inhibitors (Roche, C756U27). Gradient tubes were placed into SW41 rotor (Beckman Coulter) and spun by centrifugation at 40000 rpm for 16 hours at 4° C. Fractions of 550 μL volume were collected sequentially from the top of the gradient. 100 μL of each fraction was concentrated with 10 μL of Strataclean beads (Agilent Technologies, 400714), loaded and run on a SDS-PAGE gel, and then analyzed by SYPRO® Ruby Protein Gel Stain (Thermo Fisher Scientific) and scanned using Typhoon™ FLA 9500 scanner.

l. Mass Spectrometry Proteomics Analysis of Purified Complexes

[0511] Equal amounts of purified HA-SS18 WT and HA-SS18-SSX1 complexes were loaded onto SDS-PAGE gels from both the nuclear extract (NE) and chromatin (CHR) fractions. Samples were migrated into the gel for a length of 2 cm, gels were stained with colloidal blue stain and protein bands were excised for protein detection by mass spectrometry. The samples were then prepared and data were analyzed by the Taplin Biological Mass Spectrometry Facility directed by Dr. Steven Gygi (Harvard Medical School).

m. Protein and Peptide Pull Downs

[0512] Recombinant purified proteins with affinity tags (MBP or GST) or biotinylated peptides were purified using magnetic beads (Maltose, glutathione or streptavidin respectably) by incubation in EB150 buffer (50 mM Tris-HCl pH 7.5, 150 mM NaCl) 1 mM EDTA, 0.1% NP40 with protease inhibitor mixture (Roche, C756U27) and 1 mM PMSF) at 4° C. overnight. The flow through was removed, the immobilized bait was incubated with 1-2 μg of purified mammalian mono-nucleosomes from HEK293T cells, recombinant mono-nucleosomes (EpiCypher, 16-0006), recombinant H2AK119Ub mono-nucleosomes (EpiCypher, 16-0020) or recombinant protein for 3 hours at 4° C., and the beads were washed 3× with EB150 buffer and then eluted in 2×LDS with 200 mM DTT with heating at 95° C. for 5 minutes. The pull downs were then visualized by immunoblot analysis or colloidal blue staining.

n. Peptide Competition Experiments

[0513] The peptide competition experiments were set up in a similar manner as the peptide pull down experiments with the following exceptions: SSX1 (aa 55-78) or SMARCB1-CC (aa 351-385) biotin-labeled peptides at 10 μM in EB150 were bound to Streptavidin Dynabeads® (Pierce Streptavidin Magnetic Beads, Thermo Scientific) in parallel to 1-2 μg of mononucleosomes incubated with LANA, SSX (aa 155-188) or SMARCB1-CC (aa 351-385) peptide (KE Biochem) at varying concentrations ranging from 0-30 μM overnight at 4° C. Beads were washed 3 times in EB150, and resuspended with the mononucleosome/LANA peptide solutions. The suspension was rotated for 3-5 hours at 4° C. The beads were washed 5 times in EB150, and eluted in Sample Buffer (2×LDS with 200 mM DTT) to load onto 10-20% Tricine gels.

o. Quantitative Targeted Mass Spectrometry

[0514] Mammalian mono-nucleosomes purified from MBP-SSX1 78aa pull downs along with representative input samples were prepared and analyzed by the targeted mass spectrometry pipeline described previously (Creech et al. (2015) Methods 72:57-64). Briefly, samples were prepared by histone extraction by acid precipitation followed by protein digestion from incubation with trypsin. To these prepared samples, synthesized isotopically labeled peptides of histone tails with numerous modifications were added at a known quantity. Each sample was then separated using a Proxeon EASY-nLC™ 1000 UHPLC system (Thermo Scientific) and detected with a Q Exactive™ mass spectrometer (Thermo Scientific). The fold change in abundance of each histone peptide from the input sample compared to the pull down was calculated from the light:heavy ratio in detected peak size.

p. Detection of Nucleosome Acidic Patch Interactions by Photocrosslinking

[0515] Details of the design and preparation of diazirine containing nucleosomes for photo-crosslinking studies were described elsewhere (Dao et al. (2019) Nat. Chem. Biol. doi:10.1038/s41589-019-0413-4). Briefly, diazirine-containing recombinant nucleosomes (0.5 uM) were incubated with biotinylated SSX peptides (12.5 uM) in binding buffer (20 mM HEPES, pH 7.9, 4 mM Tris, pH 7.5, 150 mM KCl, 10 mM MgCl2, 10% glycerol, and 0.02% (v/v) IGEPAL CA-630) at 30° C. for 30 mins, and cooled on ice for 5 mins. The reaction mixtures were then irradiated at 365 nm for 10 minutes. Reactions were then analyzed by western blotting employing IRDye® 800CW streptavidin on a LI-COR Odyssey® Infrared Imager. Additional details are found in Dao et al. (2019) Nat. Chem. Biol. doi:10.1038/s41589-019-0413-4.

q. Immunofluorescence

[0516] Immunofluorescent images were obtained as previously described (Daou et al. (2011) Pro. Nat. Acad. Sci. U.S.A 108:2747-2752). Following lentiviral infection and/or drug treatment, cells were prepared by fixation in 3% PFA-PBS and then were permeabilized with PBS 0.1% NP40. Following incubation with primary antibodies, the Anti-rabbit Alexa Fluor® 594 and Anti-mouse Alexa Fluor® 488 (Life Technologies) secondary antibodies were used for visualization. Staining with 4′,6-diamidino-2-phenylindole (DAPI) was used to visualize nuclei. Images were acquired using Zeiss Axio Imager Z2 microscope and images were processed using ImageJ program (NIH).

r. Fluorescent Recovery after Photobleaching (FRAP)

[0517] The FRAP experiments were carried out in the same manner as previously described (Carvalho et al. (2004) Dev. Cell 6:815-829). Briefly, HEK293T cells expressing GFP-SS18 WT or GFP-SS18-SSX1 by lentiviral infection or Aska cells co-expressing BRG1-Halo fusion with pLKO.1 shScramble control or shSSX were imaged to measure the mean fluorescence intensity of a defined nuclear region pre and post-photobleaching at 5 second intervals. The relative fluorescence intensity (RFI) for each image was calculated by normalizing the maximal difference in fluorescence intensity post-bleaching to 1. The ti/2 values and mobile fractions were determined using the software Prism (GraphPad Software) from >n=27-30 cells in each condition over two biological replicates.

s. Chromatin Immunoprecipitation (ChIP)

[0518] For chromatin immunoprecipitation (ChIP) experiments, prepared cells were harvested following 48 hours of lentiviral infection and 5 day selection (unless otherwise indicate) with puromycin or blasticidin. Capture of chromatin bound proteins was performed using standard protocols (Millipore, Billerica, MA). Briefly, cells were cross-linked with 1% formaldehyde for 10 minutes at 37° C., reaction was quenched by addition of 125 mM glycine for 5 min and then 5 (for synovial sarcoma cell lines) or 10 (for fibroblast cell lines) million fixed cells were used per experiment. Chromatin was fragmented by sonication with a Covaris E220 and the solubilized chromatin was incubated with a primary antibody overnight at 4° C. to form antibody-chromatin complexes. These complexes were incubated with Protein G-Dynabeads® (Thermo Scientific) for 3 hours at 4° C. Beads were then washed 3× and eluted. The samples then underwent crosslink reversal, treatment with RNase A (Roche), and treatment with proteinase K (Thermo Scientific) followed by DNA capture with AMPure beads (Beckman Coulter).

t. RNA Isolation from Cell Lines

[0519] Cells (1×10⁶) were collected following 48 hours of lentiviral infection and 5 days (7 days post-infection) of selection with puromycin or blasticidin for extraction of RNA for RNA-seq experiments. Samples for RNA-seq were prepared in biological duplicates (collected using independent production of lentivirus, infection, selection, and cell culture). Total RNA was collected using the RNeasy® Mini Kit (Qiagen) following homogenization of cell lysates using the QIAshredder (Qiagen).

u. Library Preparation and Sequencing for RNA and ChIP Samples

[0520] Library preparations for next-generation sequencing of RNA-seq samples were performed using the NEBNext® Poly(A) mRNA Magnetic Isolation Module (New England BioLabs) to purify mRNA from 1 μg of total RNA isolated from cells. Next, the isolated mRNA was used with the NEBNext® Ultra™ II Directional RNA Library Prep Kit for Illumina (New England BioLabs) to generate DNA. The DNA from these prepared RNA samples as well as the ChIP-seq samples were then prepared for sequencing using the NEBNext® Ultra™ II (New England BioLabs) to amplify and barcode each sample. The fragments sizes were determined using a D1000 ScreenTape system (Agilent) and the DNA quantified by Kapa Library Quantification Kit Illumina® Platforms (Kapa Biosystems). The samples were then diluted and loaded on a buffer cartridge for 75 bp single end sequencing on the NextSeq™ 500 system (Illumina).

v. Data Processing and Visualization for ChIP Samples

[0521] Alignment of ChIP-seq data was done using Bowtie2, version 2.1.0 (Langmead and Salzberg (2012) Nat. Meth. 9:357-359) and reads were mapped to the hg19 human reference genome, using the parameter -k 1.

[0522] To process the aligned data, peaks were called using MACS2 (Zhang et al. (2008) Genome Biol. 9:R137) version 2.1.0 against an input sample with a q=0.001 cutoff and broad peaks were called for each antibody in each cell line and condition. Those peaks that were mapped to unmappable chromosomes (any that were not chr1-22, X or Y) or were located in blacklisted regions of ENCODE were excluded. For downstream analysis of data, bam files were generated with duplicates removed using the samtools rmdup command and the -b option. All ChIP-seq tracks were obtained from the bedGraphToBigWig script (UCSC) using bedgraph files generated with MACS2 using the -B-SPMR options. ChIP-seq tracks were visualized using IGV version 2.4.16 (Broad Institute).

[0523] To identify peaks of BAF complex localization, the merged peak set for V5 in V5-SS18 WT and V5-SS18-SSX1 conditions was used with bedtools merge -d 2000 to cause neighboring broad peaks to be called as a single peak. Read counts across peak sets were determined by calling the Rsubread v1.26.1 bioconductor package function feature Counts( ) on bam files. Subsequently, these values were divided by the total number of mapped reads divided by one million to give a normalized value of RPM for each interval contained within the input bed.

[0524] HTSeq was used to calculate metagene read densities with fragment lengths of 200 bp to account for fragment size selection that occurs during sonication. Total read counts for each region was normalized by the number of mapped reads to calculate reads per million mapped reads. The metagene plots were created using mean read densities over all sites for each condition around the center of the peak. All ChIP-seq heatmaps were created using these same HTSeq read densities with sites were then ranked by mean ChIP-seq signal for the indicated antibody and condition. Heatmap visualization was obtained from Python matplotlib using a midpoint of 0.5 reads per million to set the threshold of visualization for the heatmap color scale.

w. Data Processing and Visualization for RNA Samples

[0525] STAR was used to determine RPM values for each sample. Significance was determined with the DESeq2 R package with input raw read counts obtained from Rsubread featureCounts against the hg19 refFlat annotation. Small RNA genes (MIR & SNO) were filtered out from the gene lists for all analyses. Genes with a significant change in expression were determined with a Bonferri-corrected p-value of less than 1e-5, a two-fold change in gene expression (|log 2FC|>1), and inclusion of expressed genes (RPKM≥1 in a minimum of one sample) to identify significantly changing genes. For visualization of RNA-seq data, heatmaps were generated by plotting the z-scores of RPKM values across each sample of the comparison conditions.

X. CRISPR-Cas9 and shRNA Synthetic Lethal Screening Data Analyses

[0526] CRISPR-Cas9 datasets (Avana-19Q3) were obtained from the Project Achilles Data Portal (available on the World Wide Web at depmap.org/portal/achilles/). Fitness (CERES) scores were extracted for each cell line and hierarchical clustering was performed using complete linkage and correlation as a distance measure. Heatmaps were generated using pheatmap in RStudio. DRIVE data is publicly available and can be downloaded from the Novartis DRIVE Data Portal (available on the World Wide Web at oncologynibr.shinyapps.io/drive/). Waterfall plots were generated using ggplot2 in RStudio.

y. Purification of Mammalian Mononucleosomes

[0527] Mammalian mononucleosomes were purified from HEK293T cells similar to as previously described (Mashtalir et al. (2014) Mol. Cell 54:392-406). Cells were scraped from plates, washed with cold PBS, and centrifuged at 5,000 rpm for 5 min at 4° C. Pellets were resuspended in hypotonic buffer (EBO: 50 mM Tris HCl, pH 7.5, 1 mM EDTA, 1 mM MgCl₂, 0.1% NP40 supplemented with 1 mM DTT, 1 mM PMSF, and protease inhibitor cocktail (Roche, C756U27) and incubated for 5 min on ice. The suspension was centrifuged at 5,000 rpm for 5 min at 4° C., and pellets were resuspended in 5 volumes of EB420 (EBO: 50 mM Tris HCl, pH 7.5, 420 mM NaCl, 1 mM MgCl2, 0.1% NP40 with supplemented with 1 mM DTT and 1 mM PMSF containing protease inhibitor cocktail (Roche, C756U27). Homogenate incubated on rotator for 1 hour at 4° C. The supernatant was then centrifuged at 20,000 rpm (30,000×g) for 1 hour at 4° C. using a SW32Ti rotor. Supernatant was then discarded and chromatin pellet was washed in MNAse buffer (20 mM Tris-HCl pH 7.5, 100 mM KCl, 2 mM MgCl₂, 1 mM CaCl₂, 0.3 μM sucrose, 0.1% NP-40, and protease inhibitor cocktail) three times. Following MNase treatment (3 U/mL for 30 min at room temperature, Sigma-Aldrich), the reaction was quenched with 5 mM of EGTA and 5 mM of EDTA. The samples were then centrifuged at 20,000×g for 1 hour at 4° C. to obtain the soluble chromatin fraction. Soluble chromatin fraction was loaded onto 10-30% glycerol gradient (Mashtalir et al. (2014) Mol. Cell 54:392-406) and fractions containing mononucleosomes were isolated and concentrated using centrifugal filter (Amicon, EMD Millipore).

z. Restriction Enzyme Accessibility Assay (REAA) Nucleosome Remodeling Assay

[0528] SMARCA4 (BRG1) levels of the ammonium sulfate nuclear extracts were normalized via BCA protein quantification and Silver Stain analyses for HA-SS18 and HA-SS18-SSX conditions. Protein was diluted for final reaction concentration of 150 μg/mL in REAA buffer (20 mM HEPES, pH 8.0, 50 mM KCl, 5 mM MgCl2) containing 0.1 mg/mL BSA, 1 mM DTT, 20 nM nucleosomes (EpiDyne Nucleosome Remodeling Assay Substrate ST601-GATC1, EpiCypher). The REAA mixture was incubated at 37° C. for 10 min, and reaction was initiated using 1-2 mM ATP (Ultrapure ATP, Promega) and 0.005 U/mL DpnJJ Restriction Enzyme (New England Biolabs). The REAA reaction mixture was quenched with 20-24 mM EDTA and placed on ice. Proteinase K (Ambion) was added at 100 mg/mL for 30-60 min, followed by either AMPure bead DNA purification and D1000 HS DNA ScreenTape Analysis (Agilent) or mixing with GelPilot® Loading Dye (QIAGEN) and loading onto 8% TBE gel (Novex 8% TBE Gels, Thermo Fisher). TBE gels were stained with either SYBR®-Safe (Invitrogen) or Syto®-60 Red Fluorescent Nucleic Acid Stain (Invitrogen), followed by imaging with UV light on an Alpha Innotech AlphaImager™ 2200 and/or with 652 nm light excitation on a Li-Cor Odyssey® CLx imaging system (LI-COR).

aa. Preparation of Peptides

[0529] Custom peptide sequences were prepared using standard synthesis techniques from KE Biochem. The peptides were confirmed to have >95% purity by HPLC and obtained as a white to off-white lyophilized powder. The powder was re-suspended in DMSO (Sigma) for use in experiments.

ab. Expression and Purification of Recombinant Proteins

[0530] DNA constructs of human SSX1 aa111-188 and related mutates in pGEX-6P2 expression vector were transformed in E. coli BL21 (DE3) cells and overexpressed in TB medium in the presence of 100 μg/ml of ampicillin. Cells were grown at 37° C. to an OD600 of 0.6, cooled to 17° C., induced with 500 μM isopropyl-1-thio-D-galactopyranoside (IPTG), incubated overnight at 17° C., collected by centrifugation, and stored at −80° C. For ¹³C- and ¹⁵N-labeled protein expression for NMR analysis, minimal media containing ¹³C-labeled glucose and ¹⁵N-labeled ammonium chloride was used for E. coli growth and protein expression, following an established protocol (Marley et al. (2001) J. Biomol. NMR 20:71-75). Cell pellets were resuspended in buffer A (25 mM HEPES, pH 7.5, 200 mM NaCl, 5% glycerol, and 0.5 mM TCEP) supplemented with 1 mM PMSF, lysed in a Microfluidizer (Microfluidics) and centrifuged at 16,000×g for 45 min. Glutathione sepharose beads (GE healthcare) were incubated with lysate supernatant for 90 min to captured GST-tagged proteins and washed with buffer A. Beads with bound protein were transferred to an FPLC-compatible column and the bound protein was washed with high salt buffer (buffer A containing 1M NaCl) followed by elution with buffer A supplemented with 15 mM glutathione (Sigma). Eluted protein fractions were collected, concentrated and purified by size exclusion chromatography using a Superdex® 75 10/300 column (GE healthcare) equilibrated with buffer A. Eluted protein was incubated with GST-3C protease at 4° C. overnight. Cleaved samples were incubated with a second round of glutathione beads to remove GST-3C and free GST, and desired protein product contained within the flow-through fractions was further purified by ion-exchange chromatography using mono-Q column (GE healthcare). Fractions containing the cleaved protein product were pooled, concentrated and stored at −80° C.

Ac. Peptide Hybridization Assay

[0531] IMR90 fibroblasts were grown on coverslips, washed with PBS and fixed using 100% ice-cold methanol for 3 minutes. Coverslips were then washed with IF wash buffer (PBS 0.1% NP40 1 mM Sodium azide) 3 times. Selected groups were treated with 200 ng/ml of recombinant USP2 catalytic domain (Boston biochem) for 1 hour. Coverslips were then washed 3 times with IF wash buffer and incubated with 2 μM of biotinylated peptides. Coverslips were subsequently washed 3 times with IF wash buffer and fixed in 3% PFA-PBS for 20 minutes. The rest of the procedure followed accordingly to standard IF protocol. In brief, following incubation with primary antibodies, the Anti-rabit Alexa Fluor® 594 and Streptavidin Alexa Fluor® 488 (Life Technologies) secondary antibodies/reagent were used for visualization of primary antibodies or biotinylated peptides. Staining with 4′,6-diamidino-2-phenylindole (DAPI) was used to visualize nuclei. Images were acquired using Zeiss Axio Imager Z2 microscope and images were processed using ImageJ program (NIH).

ad. NMR Structure Prediction

[0532] ¹⁵N and ¹³C doubly-labeled C-terminal deletion mutant SSX1-7aa (aal11-181) protein were expressed from E. coli in M9 minimal medium containing ¹⁵NH₄Cl and ¹³C-glucose as the sole nitrogen and carbon sources. Non-uniformly-sampled (NUS) triple resonance experiments, HNCA, HN(CO)CA, HNCO, HN(CA)CO, HN(CA)CB, HN(COCA)CB, and C(CO)NH, using 0.33 mM ₁₅N/₁₃C-SSX1-7aa(aa 111-181) protein in PBS buffer, pH 6.5 with 10% D20, were performed at 15° C. on a 700 MHz Agilent DD2 spectrometer equipped with a cryogenic probe. The data were processed using NMRPipe (Delaglio et al. (1995) J. Biomol. NMR 6:277-293) and Iterative Soft Thresholding reconstruction approach (istHMS) (Hyberts et al. (2012) J. Biomol. NMR 52:315-327) and analyzed by CARA (Keller (2005) ETH). Backbone dihedral angle restraints and secondary structure predications based on assigned chemical shifts were obtained using the TALOS+ software (Shen et al. (2009) J. Biomol. NMR 44:213-223).

ae. Nuclear Extraction

[0533] Nuclear extracts for 293T V5-SS18WT and V5-SS18-SSX1 cells were prepared as described in Mashtalir et al. (2018) Cell 175:1272-1288. Specifically, cells were scraped from plates, washed with cold PBS, pelleted at 3,000 rpm for 5 min at 4° C., and resuspended in Buffer A hypotonic buffer (50 mM Hepes, pH 7.6, 25 mM KCl, 10% Glycerol, 0.1% NP-40, 0.05 mM EDTA, 5 mM MgCl2 supplemented with protease inhibitor (Roche), and 1 mM phenylmethylsulfonyl fluoride (PMSF)). Lysates were pelleted at 3,000 rpm for 5 min at 4 C. Supernatants were discarded, and nuclei were resuspended in Buffer C high salt buffer (10 mM Hepes, pH 7.6, 100 mM KCl, 10% Glycerol, 0.5 mM EDTA, 3 mM MgCl2 supplemented with protease inhibitor and 1 mM PMSF). Lysates were incubated at 4° C. at constant rotation. Lysates were then pelleted at 40,000×rpm for 1 hour at 4° C. Supernatants were collected, and mixed with (NH4)2SO4 at 300 mg/ml for 30 min. Samples were pelleted at 15,000 rpm for 30 minutes and supernatant was discarded. Protein concentrations were quantified via bicinchonic acid (BCA) assay (Pierce). Finally, samples were supplemented with 1 mM DTT.

af. ATPase Assays

[0534] ATPase consumption assays were performed using the ADP-Glo Kinase Assay kit (Promega). The same conditions as the REAA nucleosome remodeling assay described above were used. Following incubation with desired substrates for 40 min at 37° C., 1× volume of ADP-Glo Reagent was used to quench the reaction and incubated at RT for 40 min. 2× volume of the Kinase Detection Reagent was then added and incubated at RT for 1 h. Luminescence readout was recorded. Substrates used for this assay were purified recombinant mononucleosome (EpiDyne Nucleosome Remodeling Assay Substrate ST601-GATC1, EpiCypher, Cat #16-4101). Nuclear extract material was used at 150ug for each ARID1A-IP using ARID1A antibody (Cell Signaling, Cat #12354S).

### Example 2: SS18-SSX-Bound BAF Complexes Bind Chromatin with Uniquely High Affinity Via Stoichiometric Histone Binding

[0535] Interactions between chromatin-associated proteins and the histone landscape play major roles in dictating genome topology and gene expression. Cancer-specific fusion oncoproteins display unique chromatin localization patterns, yet often lack classical transcription factor-like DNA-binding domains, presenting challenges in identifying mechanisms governing their site-specific chromatin targeting and function. Recent studies indicate that SS18-SSX-bound BAF complexes have specialized biochemical and chromatin localization properties (McBride et al. (2018) Cancer Cell 33:1128-1141; Kadoch and Crabtree (2013) Cell 153:71-85). To explore the underlying molecular recognition mechanisms driving these associations and activities, HA-tagged versions of either wild-type (WT) SS18 or SS18-SSX were expressed in HEK-293T cells and BAF complex purifications were performed from soluble nuclear extract (NE) and nuclease-treated solubilized chromatin (CHR) (FIG. 1A). Strikingly, fusion oncoprotein SS18-SSX-bound BAF complexes preferentially eluted in the CHR material, in contrast to WT complexes, which eluted nearly completely in the soluble NE material, as expected from previous studies examining WT (and other loss-of-function mutant variants of) BAF complexes (Kadoch et al. (2013) Nat. Genetics 45:592-601; Mashtalir et al. (2018) Cell 175:1272-1288). Importantly, SS18-SSX-bound complexes captured near-stoichiometric amounts of core histone proteins H2A, H2B, H3, and H4 (FIG. 1A). The complexes were next subjected to mass-spectrometric (MS) analyses and selective co-enrichment of histone peptides with HA-SS18-SSX, but not with HA-WT SS18 was found in the chromatin-bound fractions (FIG. 1B, FIGS. 2A-2B). Notably, peptides corresponding to the H2A K119Ub mark were captured only in the purifications of SS18-SSX-bound complexes but not in SS18 WT complexes, in agreement with the visualization of this mark upon colloidal blue staining (FIG. 1A, Tables 5A-5E). In addition, it was found that SS18-SSX purifications most substantially enriched for ATPase subunits SMARCA4 and SMARCA2, BCL7A, and ACTL6A, consistent with the fact that SS18 is part of the ATPase module of mSWI/SNF complexes (Mashtalir et al. (2018) Cell 175:1272-1288), while core module components, particularly SMARCB1 were less enriched compared to WT SS18 purifications (FIG. 1B, FIGS. 2F and 2G, Tables 5A-5E). Binding to PRC1 components was not detected, as has been previously indicated (Banito et al. (2018) Cancer cell 33:527-541) (FIG. 2B).

TABLE 5A
HA-SS18SSX1_CHR_peptides

| Unique | Total | reference | Gene Symbol | MWT(kDa) | AVG |
|---|---|---|---|---|---|
| 55 | 584 | sp\|P51532\|SMCA4_HUMAN | SMARCA4 | 184.53 | 3.196 |
| 84 | 490 | sp\|P51531\|SMCA2_HUMAN | SMARCA2 | 181.17 | 2.9458 |
| 12 | 366 | sp\|P33778\|H2B1B_HUMAN | HIST1H2BB | 13.94 | 2.4497 |
| 9 | 214 | sp\|Q96KK5\|H2A1H_HUMAN | HIST1H2AH | 13.9 | 2.5116 |
| 69 | 167 | sp\|O14497\|ARI1A_HUMAN | ARID1A | 241.89 | 3.2645 |
| 51 | 165 | sp\|Q8TAQ2\|SMRC2_HUMAN | SMARCC2 | 132.8 | 2.9885 |
| 29 | 160 | sp\|O96019\|ACL6A_HUMAN | ACTL6A | 47.43 | 3.1707 |
| 39 | 133 | sp\|Q92922\|SMRC1_HUMAN | SMARCC1 | 122.79 | 3.0345 |
| 64 | 125 | sp\|Q8NFD5\|ARI1B_HUMAN | ARID1B | 235.97 | 3.0308 |
| 12 | 125 | sp\|P62805\|H4_HUMAN | HIST1H4A | 11.36 | 2.7795 |
| 12 | 119 | sp\|P62736\|ACTA_HUMAN | ACTA2 | 41.98 | 2.5744 |
| 34 | 78 | sp\|Q9NYF8\|BCLF1_HUMAN | BCLAF1 | 106.06 | 3.1403 |
| 57 | 73 | sp\|Q14839\|CHD4_HUMAN | CHD4 | 217.87 | 3.3514 |
| 9 | 73 | sp\|P63261\|ACTG_HUMAN | ACTG1 | 41.77 | 3.283 |
| 12 | 70 | sp\|Q4VC05\|BCL7A_HUMAN | BCL7A | 22.8 | 3.4877 |
| 62 | 68 | sp\|O75691\|UTP20_HUMAN | UTP20 | 318.18 | 3.3196 |
| 25 | 67 | sp\|Q9H307\|PININ_HUMAN | PNN | 81.56 | 3.0645 |
| 27 | 66 | sp\|Q6STE5\|SMRD3_HUMAN | SMARCD3 | 54.98 | 3.1596 |
| 25 | 61 | sp\|Q969G3\|SMCE1_HUMAN | SMARCE1 | 46.62 | 3.3347 |
| 25 | 61 | sp\|Q96GM5\|SMRD1_HUMAN | SMARCD1 | 58.2 | 3.3292 |
| 4 | 60 | sp\|Q16384\|SSX1_HUMAN | SSX1 | 21.92 | 3.3725 |
| 20 | 57 | sp\|Q12824\|SNF5_HUMAN | SMARCB1 | 44.11 | 3.1529 |
| 21 | 55 | sp\|Q00839\|HNRPU_HUMAN | HNRNPU | 90.53 | 3.0794 |
| 27 | 54 | sp\|Q9UKV3\|ACINU_HUMAN | ACIN1 | 151.77 | 2.983 |
| 33 | 51 | sp\|Q9H0A0\|NAT10_HUMAN | NAT10 | 115.66 | 3.4608 |
| 17 | 49 | sp\|P22087\|FBRL_HUMAN | FBL | 33.76 | 2.9946 |
| 23 | 47 | sp\|Q92925\|SMRD2_HUMAN | SMARCD2 | 58.88 | 3.3416 |
| 42 | 45 | sp\|Q8WYP5\|ELYS_HUMAN | AHCTF1 | 252.34 | 3.4462 |
| 22 | 45 | sp\|Q9Y2W1\|TR150_HUMAN | THRAP3 | 108.6 | 3.1033 |
| 42 | 44 | sp\|Q14980\|NUMA1_HUMAN | NUMA1 | 238.12 | 3.8461 |
| 42 | 44 | sp\|O75643\|U520_HUMAN | SNRNP200 | 244.35 | 3.2527 |
| 38 | 42 | sp\|Q6P2Q9\|PRP8_HUMAN | PRPF8 | 273.43 | 3.3056 |
| 38 | 42 | sp\|P11388\|TOP2A_HUMAN | TOP2A | 174.28 | 3.2238 |
| 31 | 42 | sp\|O00567\|NOP56_HUMAN | NOP56 | 66.01 | 3.3301 |
| 24 | 38 | sp\|P52272\|HNRPM_HUMAN | HNRNPM | 77.46 | 3.1869 |
| 20 | 38 | sp\|P08670\|VIME_HUMAN | VIM | 53.62 | 3.2563 |
| 31 | 37 | sp\|Q08211\|DHX9_HUMAN | DHX9 | 140.87 | 3.568 |
| 13 | 36 | sp\|Q14978\|NOLC1_HUMAN | NOLC1 | 73.56 | 2.6167 |
| 21 | 33 | sp\|P20700\|LMNB1_HUMAN | LMNB1 | 66.37 | 3.162 |
| 24 | 32 | sp\|O60264\|SMCA5_HUMAN | SMARCA5 | 121.83 | 3.1653 |
| 5 | 32 | sp\|P62987\|RL40_HUMAN | UBA52 | 14.72 | 2.7242 |
| 31 | 31 | sp\|Q9H583\|HEAT1_HUMAN | HEATR1 | 242.22 | 3.443 |
| 4 | 31 | sp\|Q71DI3\|H32_HUMAN | HIST2H3A | 15.38 | 1.8646 |
| 11 | 29 | sp\|Q8WUZ0\|BCL7C_HUMAN | BCL7C | 23.45 | 3.4264 |
| 9 | 29 | sp\|P45973\|CBX5_HUMAN | CBX5 | 22.21 | 2.805 |
| 27 | 28 | sp\|O75533\|SF3B1_HUMAN | SF3B1 | 145.74 | 3.3041 |
| 26 | 28 | sp\|Q9UIG0\|BAZ1B_HUMAN | BAZ1B | 170.8 | 3.4813 |
| 26 | 28 | sp\|Q9Y5B9\|SP16H_HUMAN | SUPT16H | 119.84 | 3.4761 |
| 20 | 27 | sp\|P17480\|UBF1_HUMAN | UBTF | 89.35 | 3.043 |
| 26 | 26 | sp\|Q14690\|RRP5_HUMAN | PDCD11 | 208.57 | 3.5217 |
| 24 | 26 | sp\|Q96T58\|MINT_HUMAN | SPEN | 402 | 3.2629 |
| 19 | 26 | sp\|Q9Y2X3\|NOP58_HUMAN | NOP58 | 59.54 | 4.0996 |
| 19 | 26 | sp\|Q08945\|SSRP1_HUMAN | SSRP1 | 81.02 | 3.2852 |
| 23 | 25 | sp\|Q9NZM4\|BICRA_HUMAN | BICRA | 158.39 | 3.5192 |
| 11 | 25 | sp\|Q07955\|SRSF1_HUMAN | SRSF1 | 27.73 | 2.7723 |
| 23 | 24 | sp\|Q6PL18\|ATAD2_HUMAN | ATAD2 | 158.46 | 3.5607 |
| 20 | 23 | sp\|P46100\|ATRX_HUMAN | ATRX | 282.41 | 3.3981 |
| 17 | 23 | sp\|P25440\|BRD2_HUMAN | BRD2 | 88.01 | 3.4653 |
| 8 | 23 | sp\|Q15287\|RNPS1_HUMAN | RNPS1 | 34.19 | 2.513 |
| 20 | 22 | sp\|Q14676\|MDC1_HUMAN | MDC1 | 226.53 | 3.4061 |
| 19 | 20 | sp\|Q14692\|BMS1_HUMAN | BMS1 | 145.72 | 3.6681 |
| 19 | 20 | sp\|P46013\|KI67_HUMAN | MKI67 | 358.47 | 3.0296 |
| 18 | 20 | sp\|Q9H8M2\|BRD9_HUMAN | BRD9 | 66.96 | 3.7468 |
| 18 | 20 | sp\|Q96T23\|RSF1_HUMAN | RSF1 | 163.72 | 3.644 |
| 18 | 20 | sp\|Q15393\|SF3B3_HUMAN | SF3B3 | 135.49 | 3.5038 |
| 18 | 20 | sp\|Q02880\|TOP2B_HUMAN | TOP2B | 183.15 | 3.4782 |
| 14 | 20 | sp\|Q92785\|REQU_HUMAN | DPF2 | 44.13 | 4.0099 |
| 14 | 20 | sp\|O75367\|H2AY_HUMAN | H2AFY | 39.59 | 3.3191 |
| 13 | 20 | sp\|P43243\|MATR3_HUMAN | MATR3 | 94.56 | 3.2566 |
| 12 | 20 | sp\|Q1KMD3\|HNRL2_HUMAN | HNRNPUL2 | 85.05 | 3.3094 |
| 3 | 20 | sp\|Q01130\|SRSF2_HUMAN | SRSF2 | 25.46 | 4.6781 |
| 18 | 19 | sp\|Q6KC79\|NIPBL_HUMAN | NIPBL | 315.85 | 3.4965 |
| 18 | 19 | sp\|O14646\|CHD1_HUMAN | CHD1 | 196.57 | 3.3084 |
| 17 | 19 | sp\|Q9BQG0\|MBB1A_HUMAN | MYBBP1A | 148.76 | 3.1516 |
| 15 | 19 | sp\|P46087\|NOP2_HUMAN | NOP2 | 89.25 | 3.5025 |
| 17 | 18 | sp\|Q8WWQ0\|PHIP_HUMAN | PHIP | 206.56 | 3.1097 |
| 15 | 18 | sp\|Q12905\|ILF2_HUMAN | ILF2 | 43.04 | 3.9059 |
| 15 | 18 | sp\|Q8IXT5\|RB12B_HUMAN | RBM12B | 118.03 | 2.9192 |
| 2 | 18 | sp\|Q9BRL6\|SRSF8_HUMAN | SRSF8 | 32.27 | 1.8838 |
| 17 | 17 | sp\|P78527\|PRKDC_HUMAN | PRKDC | 468.79 | 3.4649 |
| 17 | 17 | sp\|Q15029\|U5S1_HUMAN | EFTUD2 | 109.37 | 3.3215 |
| 15 | 17 | sp\|Q13435\|SF3B2_HUMAN | SF3B2 | 100.16 | 3.6324 |
| 9 | 17 | sp\|P50402\|EMD_HUMAN | EMD | 28.98 | 2.4119 |
| 7 | 17 | sp\|Q5BKZ1\|ZN326_HUMAN | ZNF326 | 65.61 | 2.8312 |
| 15 | 16 | sp\|Q14683\|SMC1A_HUMAN | SMC1A | 143.14 | 3.0529 |
| 14 | 16 | sp\|Q86U86\|PB1_HUMAN | PBRM1 | 192.83 | 3.4056 |
| 13 | 16 | sp\|Q12906\|ILF3_HUMAN | ILF3 | 95.28 | 3.2276 |
| 11 | 16 | sp\|Q9BVJ6\|UT14A_HUMAN | UTP14A | 87.92 | 3.5193 |
| 14 | 15 | sp\|Q9H2P0\|ADNP_HUMAN | ADNP | 123.49 | 3.5487 |
| 14 | 15 | sp\|Q7Z3K3\|POGZ_HUMAN | POGZ | 155.24 | 3.486 |
| 14 | 15 | sp\|Q9Y3T9\|NOC2L_HUMAN | NOC2L | 84.87 | 3.4078 |
| 13 | 15 | sp\|Q9P0M6\|H2AW_HUMAN | H2AFY2 | 40.03 | 3.4783 |
| 12 | 15 | sp\|O76021\|RL1D1_HUMAN | RSL1D1 | 54.94 | 3.0238 |
| 14 | 14 | sp\|Q03164\|KMT2A_HUMAN | KMT2A | 431.5 | 4.0265 |
| 14 | 14 | sp\|Q9UIF9\|BAZ2A_HUMAN | BAZ2A | 211.07 | 3.4659 |
| 13 | 14 | sp\|Q13620\|CUL4B_HUMAN | CUL4B | 103.92 | 3.6501 |
| 12 | 14 | sp\|O60306\|AQR_HUMAN | AQR | 171.19 | 3.1564 |
| 10 | 14 | sp\|Q6AI39\|BICRL_HUMAN | BICRAL | 115.01 | 3.6798 |
| 10 | 14 | sp\|Q9NY61\|AATF_HUMAN | AATF | 63.09 | 3.3347 |
| 3 | 14 | tr\|B9EGQ8\|B9EGQ8_HUMAN | SMARCA4 | 189.33 | 3.1403 |
| 2 | 14 | sp\|Q15532\|SSXT_HUMAN | SS18 | 45.9 | 2.6438 |
| 13 | 13 | sp\|Q9UK61\|TASOR_HUMAN | FAM208A | 188.91 | 3.4606 |
| 13 | 13 | sp\|Q9NTI5\|PDS5B_HUMAN | PDS5B | 164.56 | 2.9322 |
| 12 | 13 | sp\|P23396\|RS3_HUMAN | RPS3 | 26.67 | 2.7633 |
| 11 | 13 | sp\|Q49A26\|GLYR1_HUMAN | GLYR1 | 60.52 | 3.509 |
| 9 | 13 | sp\|P55795\|HNRH2_HUMAN | HNRNPH2 | 49.23 | 3.2887 |
| 9 | 13 | sp\|Q86VM9\|ZCH18_HUMAN | ZC3H18 | 106.32 | 2.9032 |
| 9 | 13 | sp\|Q13247\|SRSF6_HUMAN | SRSF6 | 39.56 | 2.4674 |
| 3 | 13 | sp\|Q71UI9\|H2AV_HUMAN | H2AFV | 13.5 | 2.7796 |
| 12 | 12 | sp\|P24928\|RPB1_HUMAN | POLR2A | 217.04 | 3.3463 |
| 12 | 12 | sp\|O43143\|DHX15_HUMAN | DHX15 | 90.88 | 3.2449 |
| 12 | 12 | sp\|Q96GQ7\|DDX27_HUMAN | DDX27 | 89.78 | 3.0281 |
| 6 | 12 | sp\|P31943\|HNRH1_HUMAN | HNRNPH1 | 49.2 | 2.9519 |
| 11 | 11 | sp\|O60216\|RAD21_HUMAN | RAD21 | 71.64 | 3.9259 |
| 11 | 11 | sp\|P09874\|PARP1_HUMAN | PARP1 | 113.01 | 3.4647 |
| 11 | 11 | sp\|Q12788\|TBL3_HUMAN | TBL3 | 88.98 | 3.4469 |
| 11 | 11 | sp\|P33993\|MCM7_HUMAN | MCM7 | 81.26 | 3.3527 |
| 11 | 11 | sp\|Q9NYH9\|UTP6_HUMAN | UTP6 | 70.15 | 3.3108 |
| 11 | 11 | sp\|Q8TDD1\|DDX54_HUMAN | DDX54 | 98.53 | 3.2741 |
| 11 | 11 | sp\|Q15397\|PUM3_HUMAN | PUM3 | 73.54 | 3.2129 |
| 11 | 11 | sp\|P28370\|SMCA1_HUMAN | SMARCA1 | 122.53 | 2.7975 |
| 11 | 11 | sp\|Q13619\|CUL4A_HUMAN | CUL4A | 87.62 | 2.6132 |
| 10 | 11 | sp\|Q12873\|CHD3_HUMAN | CHD3 | 226.45 | 3.7322 |
| 10 | 11 | sp\|Q8IZL8\|PELP1_HUMAN | PELP1 | 119.62 | 3.6196 |
| 10 | 11 | sp\|P18583\|SON_HUMAN | SON | 263.66 | 3.395 |
| 10 | 11 | sp\|Q99549\|MPP8_HUMAN | MPHOSPH8 | 97.12 | 3.3621 |
| 10 | 11 | sp\|Q9UKM9\|RALY_HUMAN | RALY | 32.44 | 3.1183 |
| 9 | 11 | sp\|O00541\|PESC_HUMAN | PES1 | 67.96 | 2.4036 |
| 7 | 11 | sp\|Q13243\|SRSF5_HUMAN | SRSF5 | 31.25 | 3.5127 |
| 6 | 11 | sp\|Q16629\|SRSF7_HUMAN | SRSF7 | 27.35 | 2.6912 |
| 4 | 11 | sp\|P16403\|H12_HUMAN | HIST1H1C | 21.35 | 2.8282 |
| 2 | 11 | sp\|Q02539\|H11_HUMAN | HIST1H1A | 21.83 | 2.9123 |
| 2 | 11 | sp\|Q93079\|H2B1H_HUMAN | HIST1H2BH | 13.88 | 2.2042 |
| 10 | 10 | sp\|Q99459\|CDC5L_HUMAN | CDC5L | 92.19 | 3.4411 |
| 10 | 10 | sp\|P38919\|IF4A3_HUMAN | EIF4A3 | 46.84 | 3.4146 |
| 10 | 10 | sp\|Q8N7H5\|PAF1_HUMAN | PAF1 | 59.94 | 3.3744 |
| 10 | 10 | sp\|Q6PD62\|CTR9_HUMAN | CTR9 | 133.42 | 3.368 |
| 10 | 10 | sp\|Q92794\|KAT6A_HUMAN | KAT6A | 224.89 | 3.2929 |
| 10 | 10 | sp\|Q8IWA0\|WDR75_HUMAN | WDR75 | 94.44 | 3.1652 |
| 10 | 10 | sp\|Q9ULI0\|ATD2B_HUMAN | ATAD2B | 164.81 | 3.1043 |
| 10 | 10 | sp\|Q03188\|CENPC_HUMAN | CENPC | 106.77 | 3.0478 |
| 10 | 10 | sp\|Q9NVP1\|DDX18_HUMAN | DDX18 | 75.36 | 2.7626 |
| 10 | 10 | sp\|Q9UQ35\|SRRM2_HUMAN | SRRM2 | 299.44 | 2.7014 |
| 9 | 10 | sp\|Q9Y4W2\|LAS1L_HUMAN | LAS1L | 83.01 | 3.8251 |
| 9 | 10 | sp\|Q9Y2R4\|DDX52_HUMAN | DDX52 | 67.46 | 3.626 |
| 9 | 10 | sp\|Q14202\|ZMYM3_HUMAN | ZMYM3 | 152.28 | 3.4516 |
| 9 | 10 | sp\|Q9NR30\|DDX21_HUMAN | DDX21 | 87.29 | 3.4294 |
| 9 | 10 | sp\|P62701\|RS4X_HUMAN | RPS4X | 29.58 | 3.093 |
| 9 | 10 | sp\|Q13601\|KRR1_HUMAN | KRR1 | 43.64 | 3.0329 |
| 9 | 10 | sp\|Q92841\|DDX17_HUMAN | DDX17 | 80.22 | 2.8111 |
| 8 | 10 | sp\|Q8NC56\|LEMD2_HUMAN | LEMD2 | 56.94 | 3.249 |
| 8 | 10 | sp\|Q7Z7K6\|CENPV_HUMAN | CENPV | 29.93 | 3.2113 |
| 9 | 9 | sp\|P57740\|NU107_HUMAN | NUP107 | 106.31 | 3.6499 |
| 9 | 9 | sp\|Q03701\|CEBPZ_HUMAN | CEBPZ | 120.9 | 3.5391 |
| 9 | 9 | sp\|O60281\|ZN292_HUMAN | ZNF292 | 304.62 | 3.2897 |
| 9 | 9 | sp\|Q13330\|MTA1_HUMAN | MTA1 | 80.74 | 3.2111 |
| 9 | 9 | sp\|O43390\|HNRPR_HUMAN | HNRNPR | 70.9 | 3.1736 |
| 9 | 9 | sp\|P49750\|YLPM1_HUMAN | YLPM1 | 219.85 | 3.1531 |
| 9 | 9 | sp\|Q9BSC4\|NOL10_HUMAN | NOL10 | 80.25 | 3.0247 |
| 9 | 9 | sp\|Q8N1F7\|NUP93_HUMAN | NUP93 | 93.43 | 2.9512 |
| 9 | 9 | sp\|Q7Z5J4\|RAI1_HUMAN | RAI1 | 203.23 | 2.939 |
| 9 | 9 | sp\|Q92621\|NU205_HUMAN | NUP205 | 227.78 | 2.9163 |
| 8 | 9 | sp\|Q9Y5J1\|UTP18_HUMAN | UTP18 | 61.96 | 3.6186 |
| 8 | 9 | sp\|Q9Y5B6\|PAXB1_HUMAN | PAXBP1 | 104.74 | 3.4559 |
| 8 | 9 | sp\|P12236\|ADT3_HUMAN | SLC25A6 | 32.85 | 2.8579 |
| 8 | 9 | sp\|P22626\|ROA2_HUMAN | HNRNPA2B1 | 37.41 | 2.8007 |
| 8 | 9 | sp\|P02545\|LMNA_HUMAN | LMNA | 74.09 | 2.7943 |
| 4 | 9 | sp\|P07305\|H10_HUMAN | H1F0 | 20.85 | 3.1846 |
| 8 | 8 | sp\|Q9UH99\|SUN2_HUMAN | SUN2 | 80.26 | 4.2804 |
| 8 | 8 | sp\|Q9NXF1\|TEX10_HUMAN | TEX10 | 105.61 | 3.9844 |
| 8 | 8 | sp\|O15213\|WDR46_HUMAN | WDR46 | 68.03 | 3.9455 |
| 8 | 8 | sp\|O00159\|MYO1C_HUMAN | MYO1C | 121.61 | 3.5705 |
| 8 | 8 | sp\|Q8N3U4\|STAG2_HUMAN | STAG2 | 141.24 | 3.4872 |
| 8 | 8 | sp\|Q9BVP2\|GNL3_HUMAN | GNL3 | 61.95 | 3.4513 |
| 8 | 8 | sp\|Q5QJE6\|TDIF2_HUMAN | DNTTIP2 | 84.42 | 3.3455 |
| 8 | 8 | sp\|Q16531\|DDB1_HUMAN | DDB1 | 126.89 | 3.3262 |
| 8 | 8 | sp\|Q6ZRS2\|SRCAP_HUMAN | SRCAP | 343.34 | 3.1877 |
| 7 | 8 | sp\|Q9UMS4\|PRP19_HUMAN | PRPF19 | 55.15 | 3.6093 |
| 7 | 8 | sp\|Q9H6F5\|CCD86_HUMAN | CCDC86 | 40.21 | 3.5931 |
| 7 | 8 | sp\|Q9BZE4\|NOG1_HUMAN | GTPBP4 | 73.92 | 3.1582 |
| 7 | 8 | sp\|O60832\|DKC1_HUMAN | DKC1 | 57.64 | 3.1341 |
| 7 | 8 | sp\|P39019\|RS19_HUMAN | RPS19 | 16.05 | 2.5209 |
| 5 | 8 | sp\|Q9BQE9\|BCL7B_HUMAN | BCL7B | 22.18 | 2.9657 |
| 4 | 8 | sp\|Q13595\|TRA2A_HUMAN | TRA2A | 32.67 | 2.8133 |
| 7 | 7 | sp\|O00566\|MPP10_HUMAN | MPHOSPH10 | 78.82 | 4.0635 |
| 7 | 7 | sp\|Q8IY81\|SPB1_HUMAN | FTSJ3 | 96.5 | 3.8802 |
| 7 | 7 | sp\|Q8WXH0\|SYNE2_HUMAN | SYNE2 | 795.94 | 3.7401 |
| 7 | 7 | sp\|O95251\|KAT7_HUMAN | KAT7 | 70.6 | 3.5459 |
| 7 | 7 | sp\|P42285\|SK2L2_HUMAN | SKIV2L2 | 117.73 | 3.4754 |
| 7 | 7 | sp\|P42167\|LAP2B_HUMAN | TMPO | 50.64 | 3.3395 |
| 7 | 7 | sp\|O14647\|CHD2_HUMAN | CHD2 | 211.21 | 3.2097 |
| 7 | 7 | sp\|Q9NRL2\|BAZ1A_HUMAN | BAZ1A | 178.59 | 3.2083 |
| 7 | 7 | sp\|Q13129\|RLF_HUMAN | RLF | 217.81 | 3.1787 |
| 7 | 7 | sp\|Q13111\|CAF1A_HUMAN | CHAF1A | 106.86 | 3.1007 |
| 7 | 7 | sp\|P68371\|TBB4B_HUMAN | TUBB4B | 49.8 | 2.9823 |
| 7 | 7 | sp\|P78316\|NOP14_HUMAN | NOP14 | 97.61 | 2.902 |
| 7 | 7 | sp\|O15042\|SR140_HUMAN | U2SURP | 118.22 | 2.8143 |
| 7 | 7 | sp\|Q5SSJ5\|HP1B3_HUMAN | HP1BP3 | 61.17 | 2.7313 |
| 7 | 7 | sp\|Q9NQS7\|INCE_HUMAN | INCENP | 105.36 | 2.6037 |
| 6 | 7 | sp\|Q13185\|CBX3_HUMAN | CBX3 | 20.8 | 3.6562 |
| 6 | 7 | sp\|P21796\|VDAC1_HUMAN | VDAC1 | 30.75 | 3.204 |
| 6 | 7 | sp\|P36578\|RL4_HUMAN | RPL4 | 47.67 | 2.6157 |
| 5 | 7 | sp\|Q92784\|DPF3_HUMAN | DPF3 | 43.06 | 3.5672 |
| 5 | 7 | sp\|O00422\|SAP18_HUMAN | SAP18 | 17.55 | 3.3178 |
| 5 | 7 | sp\|Q9H9B1\|EHMT1_HUMAN | EHMT1 | 141.38 | 3.3147 |
| 5 | 7 | sp\|P62995\|TRA2B_HUMAN | TRA2B | 33.65 | 3.2146 |
| 5 | 7 | IGH1M_MOUSE | Ighg1 | 43.36 | 2.9952 |
| 5 | 7 | sp\|Q8TDI0\|CHD5_HUMAN | CHD5 | 222.91 | 2.86 |
| 4 | 7 | sp\|P07910\|HNRPC_HUMAN | HNRNPC | 33.65 | 3.3974 |
| 6 | 6 | sp\|Q15061\|WDR43_HUMAN | WDR43 | 74.84 | 4.277 |
| 6 | 6 | sp\|Q9NQZ2\|SAS10_HUMAN | UTP3 | 54.53 | 4.2012 |
| 6 | 6 | sp\|Q15269\|PWP2_HUMAN | PWP2 | 102.39 | 4.0268 |
| 6 | 6 | sp\|P61978\|HNRPK_HUMAN | HNRNPK | 50.94 | 3.9336 |
| 6 | 6 | sp\|P19338\|NUCL_HUMAN | NCL | 76.57 | 3.9301 |
| 6 | 6 | sp\|Q7KZ85\|SPT6H_HUMAN | SUPT6H | 198.95 | 3.8795 |
| 6 | 6 | sp\|Q8WTT2\|NOC3L_HUMAN | NOC3L | 92.49 | 3.7112 |
| 6 | 6 | sp\|P08865\|RSSA_HUMAN | RPSA | 32.83 | 3.5636 |
| 6 | 6 | sp\|Q8TED0\|UTP15_HUMAN | UTP15 | 58.38 | 3.547 |
| 6 | 6 | sp\|Q96KQ7\|EHMT2_HUMAN | EHMT2 | 132.29 | 3.4908 |
| 6 | 6 | sp\|P51398\|RT29_HUMAN | DAP3 | 45.54 | 3.4773 |
| 6 | 6 | sp\|Q9BVI4\|NOC4L_HUMAN | NOC4L | 58.43 | 3.4602 |
| 6 | 6 | sp\|P07199\|CENPB_HUMAN | CENPB | 65.13 | 3.337 |
| 6 | 6 | sp\|Q9BQE3\|TBA1C_HUMAN | TUBA1C | 49.86 | 3.3028 |
| 6 | 6 | sp\|Q03252\|LMNB2_HUMAN | LMNB2 | 69.91 | 3.2923 |
| 6 | 6 | sp\|Q5VWN6\|F208B_HUMAN | FAM208B | 268.68 | 3.2658 |
| 6 | 6 | sp\|Q9HC52\|CBX8_HUMAN | CBX8 | 43.37 | 3.2482 |
| 6 | 6 | sp\|Q8IWI9\|MGAP_HUMAN | MGA | 331.63 | 3.2248 |
| 6 | 6 | sp\|Q8WXI9\|P66B_HUMAN | GATAD2B | 65.22 | 3.223 |
| 6 | 6 | sp\|Q13573\|SNW1_HUMAN | SNW1 | 61.46 | 3.1062 |
| 6 | 6 | sp\|Q9Y2P8\|RCL1_HUMAN | RCL1 | 40.82 | 3.0802 |
| 6 | 6 | sp\|B2RXH8\|HNRC2_HUMAN | HNRNPCL2 | 32.05 | 3.0374 |
| 6 | 6 | sp\|P52701\|MSH6_HUMAN | MSH6 | 152.69 | 2.9401 |
| 6 | 6 | sp\|Q16891\|MIC60_HUMAN | IMMT | 83.63 | 2.895 |
| 5 | 6 | sp\|P52597\|HNRPF_HUMAN | HNRNPF | 45.64 | 3.7652 |
| 5 | 6 | sp\|Q8NEJ9\|NGDN_HUMAN | NGDN | 35.87 | 3.6102 |
| 5 | 6 | sp\|Q8ND82\|Z280C_HUMAN | ZNF280C | 83.04 | 3.3478 |
| 5 | 6 | sp\|P38159\|RBMX_HUMAN | RBMX | 42.31 | 3.2052 |
| 5 | 6 | sp\|P15880\|RS2_HUMAN | RPS2 | 31.3 | 3.1733 |
| 5 | 6 | sp\|Q5VZL5\|ZMYM4_HUMAN | ZMYM4 | 172.68 | 2.9892 |
| 5 | 6 | sp\|P62753\|RS6_HUMAN | RPS6 | 28.66 | 2.8134 |
| 5 | 6 | sp\|P29375\|KDM5A_HUMAN | KDM5A | 191.97 | 2.7763 |
| 4 | 6 | sp\|Q5TAP6\|UT14C_HUMAN | UTP14C | 87.13 | 3.2114 |
| 3 | 6 | sp\|P16104\|H2AX_HUMAN | H2AFX | 15.14 | 3.72 |
| 5 | 5 | sp\|P83916\|CBX1_HUMAN | CBX1 | 21.4 | 4.365 |
| 5 | 5 | sp\|P52292\|IMA1_HUMAN | KPNA2 | 57.83 | 4.1255 |
| 5 | 5 | sp\|Q9HCS7\|SYF1_HUMAN | XAB2 | 99.95 | 4.0454 |
| 5 | 5 | sp\|Q9UNX4\|WDR3_HUMAN | WDR3 | 106.03 | 3.9842 |
| 5 | 5 | sp\|P55265\|DSRAD_HUMAN | ADAR | 135.98 | 3.8215 |
| 5 | 5 | sp\|Q9NU22\|MDN1_HUMAN | MDN1 | 632.42 | 3.7989 |
| 5 | 5 | sp\|Q12830\|BPTF_HUMAN | BPTF | 338.05 | 3.7277 |
| 5 | 5 | sp\|O75400\|PR40A_HUMAN | PRPF40A | 108.74 | 3.6993 |
| 5 | 5 | sp\|P49792\|RBP2_HUMAN | RANBP2 | 357.97 | 3.6351 |
| 5 | 5 | sp\|O94901\|SUN1_HUMAN | SUN1 | 90.01 | 3.6143 |
| 5 | 5 | tr\|A0A1P0AZG4\|A0A1P0AZG4_HUMAN | LCOR | 137.14 | 3.5821 |
| 5 | 5 | sp\|Q9UQE7\|SMC3_HUMAN | SMC3 | 141.45 | 3.5623 |
| 5 | 5 | sp\|Q14137\|BOP1_HUMAN | BOP1 | 83.58 | 3.5549 |
| 5 | 5 | sp\|P26368\|U2AF2_HUMAN | U2AF2 | 53.47 | 3.477 |
| 5 | 5 | sp\|P68104\|EF1A1_HUMAN | EEF1A1 | 50.11 | 3.3958 |
| 5 | 5 | sp\|Q8WVM7\|STAG1_HUMAN | STAG1 | 144.34 | 3.3576 |
| 5 | 5 | sp\|Q969X6\|UTP4_HUMAN | UTP4 | 76.84 | 3.3295 |
| 5 | 5 | sp\|Q12769\|NU160_HUMAN | NUP160 | 162.02 | 3.3228 |
| 5 | 5 | sp\|Q8WUM0\|NU133_HUMAN | NUP133 | 128.9 | 3.2892 |
| 5 | 5 | sp\|Q53HL2\|BOREA_HUMAN | CDCA8 | 31.3 | 3.2744 |
| 5 | 5 | sp\|Q14684\|RRP1B_HUMAN | RRP1B | 84.38 | 3.2428 |
| 5 | 5 | sp\|P49411\|EFTU_HUMAN | TUFM | 49.51 | 3.1661 |
| 5 | 5 | sp\|Q9H582\|ZN644_HUMAN | ZNF644 | 149.47 | 3.1597 |
| 5 | 5 | sp\|P62241\|RS8_HUMAN | RPS8 | 24.19 | 3.0978 |
| 5 | 5 | sp\|Q14103\|HNRPD_HUMAN | HNRNPD | 38.41 | 2.9787 |
| 5 | 5 | sp\|Q12931\|TRAP1_HUMAN | TRAP1 | 80.06 | 2.9565 |
| 5 | 5 | sp\|Q09028\|RBBP4_HUMAN | RBBP4 | 47.63 | 2.9205 |
| 5 | 5 | sp\|Q9BWN1\|PRR14_HUMAN | PRR14 | 64.29 | 2.8386 |
| 5 | 5 | sp\|Q96GD4\|AURKB_HUMAN | AURKB | 39.29 | 2.8373 |
| 5 | 5 | sp\|Q14739\|LBR_HUMAN | LBR | 70.66 | 2.8151 |
| 5 | 5 | sp\|Q13895\|BYST_HUMAN | BYSL | 49.57 | 2.5969 |
| 5 | 5 | sp\|Q9NY12\|GAR1_HUMAN | GAR1 | 22.33 | 2.4622 |
| 4 | 5 | sp\|Q96EU6\|RRP36_HUMAN | RRP36 | 29.8 | 3.6465 |
| 4 | 5 | sp\|P14866\|HNRPL_HUMAN | HNRNPL | 64.09 | 3.6299 |
| 4 | 5 | sp\|P14678\|RSMB_HUMAN | SNRPB | 24.59 | 3.375 |
| 4 | 5 | sp\|Q96KR1\|ZFR_HUMAN | ZFR | 116.94 | 2.776 |
| 4 | 5 | sp\|P63244\|RACK1_HUMAN | RACK1 | 35.05 | 2.595 |
| 4 | 5 | sp\|Q8WYB5\|KAT6B_HUMAN | KAT6B | 231.23 | 2.3396 |
| 4 | 5 | sp\|P62269\|RS18_HUMAN | RPS18 | 17.71 | 2.3307 |
| 3 | 5 | sp\|Q7Z4V5\|HDGR2_HUMAN | HDGFL2 | 74.27 | 3.5225 |
| 3 | 5 | sp\|Q00325\|MPCP_HUMAN | SLC25A3 | 40.07 | 3.4595 |
| 3 | 5 | sp\|Q8TF01\|PNISR_HUMAN | PNISR | 92.52 | 3.272 |
| 2 | 5 | sp\|P84103\|SRSF3_HUMAN | SRSF3 | 19.32 | 2.3291 |
| 2 | 5 | sp\|Q96PV6\|LENG8_HUMAN | LENG8 | 86.07 | 1.9933 |
| 4 | 4 | sp\|P32969\|RL9_HUMAN | RPL9 | 21.85 | 4.8881 |
| 4 | 4 | sp\|Q8N201\|INT1_HUMAN | INTS1 | 244.14 | 4.2509 |
| 4 | 4 | sp\|Q14498\|RBM39_HUMAN | RBM39 | 59.34 | 4.0875 |
| 4 | 4 | sp\|P12956\|XRCC6_HUMAN | XRCC6 | 69.8 | 3.9984 |
| 4 | 4 | sp\|Q13263\|TIF1B_HUMAN | TRIM28 | 88.49 | 3.7834 |
| 4 | 4 | sp\|Q96QD9\|UIF_HUMAN | FYTTD1 | 35.8 | 3.783 |
| 4 | 4 | sp\|Q9NPI1\|BRD7_HUMAN | BRD7 | 74.09 | 3.7737 |
| 4 | 4 | sp\|O60287\|NPA1P_HUMAN | URB1 | 254.23 | 3.7233 |
| 4 | 4 | sp\|P45880\|VDAC2_HUMAN | VDAC2 | 31.55 | 3.6583 |
| 4 | 4 | sp\|P62424\|RL7A_HUMAN | RPL7A | 29.98 | 3.6514 |
| 4 | 4 | sp\|Q9Y6K1\|DNM3A_HUMAN | DNMT3A | 101.79 | 3.5442 |
| 4 | 4 | sp\|Q9BYG3\|MK671_HUMAN | NIFK | 34.2 | 3.5075 |
| 4 | 4 | sp\|P35580\|MYH10_HUMAN | MYH10 | 228.86 | 3.5027 |
| 4 | 4 | sp\|P11142\|HSP7C_HUMAN | HSPA8 | 70.85 | 3.4819 |
| 4 | 4 | sp\|O60508\|PRP17_HUMAN | CDC40 | 65.48 | 3.4393 |
| 4 | 4 | sp\|O96028\|NSD2_HUMAN | NSD2 | 152.16 | 3.359 |
| 4 | 4 | sp\|O15164\|TIF1A_HUMAN | TRIM24 | 116.76 | 3.3318 |
| 4 | 4 | sp\|Q8IX01\|SUGP2_HUMAN | SUGP2 | 120.13 | 3.3282 |
| 4 | 4 | sp\|Q14966\|ZN638_HUMAN | ZNF638 | 220.49 | 3.3182 |
| 4 | 4 | sp\|Q9NVI7\|ATD3A_HUMAN | ATAD3A | 71.32 | 3.3045 |
| 4 | 4 | sp\|Q9Y6X3\|SCC4_HUMAN | MAU2 | 69.04 | 3.2931 |
| 4 | 4 | sp\|O94776\|MTA2_HUMAN | MTA2 | 74.98 | 3.2496 |
| 4 | 4 | sp\|Q69YN4\|VIR_HUMAN | KIAA1429 | 201.9 | 3.2469 |
| 4 | 4 | sp\|Q96L73\|NSD1_HUMAN | NSD1 | 296.46 | 3.2347 |
| 4 | 4 | sp\|Q9BTV4\|TMM43_HUMAN | TMEM43 | 44.85 | 3.22 |
| 4 | 4 | sp\|Q9H9B4\|SFXN1_HUMAN | SFXN1 | 35.6 | 3.2098 |
| 4 | 4 | sp\|O14979\|HNRDL_HUMAN | HNRNPDL | 46.41 | 3.2084 |
| 4 | 4 | sp\|Q5JTV8\|TOIP1_HUMAN | TOR1AIP1 | 66.21 | 3.1934 |
| 4 | 4 | sp\|Q08170\|SRSF4_HUMAN | SRSF4 | 56.65 | 3.1185 |
| 4 | 4 | sp\|Q7L2E3\|DHX30_HUMAN | DHX30 | 133.85 | 3.0745 |
| 4 | 4 | sp\|O94906\|PRP6_HUMAN | PRPF6 | 106.86 | 3.0464 |
| 4 | 4 | sp\|P18124\|RL7_HUMAN | RPL7 | 29.21 | 3.0421 |
| 4 | 4 | sp\|P33991\|MCM4_HUMAN | MCM4 | 96.5 | 3.0269 |
| 4 | 4 | sp\|Q8IY37\|DHX37_HUMAN | DHX37 | 129.46 | 3.0184 |
| 4 | 4 | sp\|Q53GS7\|GLE1_HUMAN | GLE1 | 79.79 | 3.016 |
| 4 | 4 | sp\|P17844\|DDX5_HUMAN | DDX5 | 69.1 | 2.9945 |
| 4 | 4 | sp\|Q9H0D6\|XRN2_HUMAN | XRN2 | 108.51 | 2.9774 |
| 4 | 4 | sp\|Q15059\|BRD3_HUMAN | BRD3 | 79.49 | 2.9604 |
| 4 | 4 | sp\|Q96PK6\|RBM14_HUMAN | RBM14 | 69.45 | 2.9572 |
| 4 | 4 | sp\|Q96G21\|IMP4_HUMAN | IMP4 | 33.74 | 2.9255 |
| 4 | 4 | sp\|P35658\|NU214_HUMAN | NUP214 | 213.49 | 2.9007 |
| 4 | 4 | sp\|Q86YP4\|P66A_HUMAN | GATAD2A | 68.02 | 2.8966 |
| 4 | 4 | sp\|Q07021\|C1QBP_HUMAN | C1QBP | 31.34 | 2.8754 |
| 4 | 4 | sp\|Q6DKI1\|RL7L_HUMAN | RPL7L1 | 28.64 | 2.8526 |
| 4 | 4 | sp\|O43795\|MYO1B_HUMAN | MYO1B | 131.9 | 2.8423 |
| 4 | 4 | sp\|Q86U38\|NOP9_HUMAN | NOP9 | 69.39 | 2.814 |
| 4 | 4 | sp\|Q96ME7\|ZN512_HUMAN | ZNF512 | 64.64 | 2.8133 |
| 4 | 4 | sp\|Q13242\|SRSF9_HUMAN | SRSF9 | 25.53 | 2.7693 |
| 4 | 4 | sp\|P62277\|RS13_HUMAN | RPS13 | 17.21 | 2.7392 |
| 4 | 4 | sp\|Q8N8A6\|DDX51_HUMAN | DDX51 | 72.41 | 2.7334 |
| 4 | 4 | sp\|P49756\|RBM25_HUMAN | RBM25 | 100.12 | 2.7244 |
| 4 | 4 | sp\|O75152\|ZC11A_HUMAN | ZC3H11A | 89.08 | 2.6256 |
| 4 | 4 | sp\|P62750\|RL23A_HUMAN | RPL23A | 17.68 | 2.5769 |
| 4 | 4 | sp\|Q96HS1\|PGAM5_HUMAN | PGAM5 | 31.98 | 2.4728 |
| 4 | 4 | sp\|P26373\|RL13_HUMAN | RPL13 | 24.25 | 2.3533 |
| 3 | 4 | sp\|O95218\|ZRAB2_HUMAN | ZRANB2 | 37.38 | 3.9985 |
| 3 | 4 | sp\|Q9NS69\|TOM22_HUMAN | TOMM22 | 15.51 | 3.9897 |
| 3 | 4 | sp\|Q9Y6A4\|CFA20_HUMAN | CFAP20 | 22.76 | 3.5149 |
| 3 | 4 | sp\|P78364\|PHC1_HUMAN | PHC1 | 105.47 | 3.4121 |
| 3 | 4 | sp\|Q96DI7\|SNR40_HUMAN | SNRNP40 | 39.29 | 3.1631 |
| 3 | 4 | sp\|Q9Y277\|VDAC3_HUMAN | VDAC3 | 30.64 | 2.7054 |
| 2 | 4 | sp\|P46783\|RS10_HUMAN | RPS10 | 18.89 | 2.7067 |
| 3 | 3 | sp\|P35453\|HXD13_HUMAN | HOXD13 | 36.08 | 4.379 |
| 3 | 3 | sp\|Q15459\|SF3A1_HUMAN | SF3A1 | 88.83 | 4.3736 |
| 3 | 3 | sp\|P56182\|RRP1_HUMAN | RRP1 | 52.81 | 4.3342 |
| 3 | 3 | sp\|P25705\|ATPA_HUMAN | ATP5A1 | 59.71 | 4.272 |
| 3 | 3 | sp\|P08708\|RS17_HUMAN | RPS17 | 15.54 | 4.2613 |
| 3 | 3 | sp\|P11021\|GRP78_HUMAN | HSPA5 | 72.29 | 4.2177 |
| 3 | 3 | sp\|Q92769\|HDAC2_HUMAN | HDAC2 | 55.33 | 4.101 |
| 3 | 3 | sp\|Q15424\|SAFB1_HUMAN | SAFB | 102.58 | 4.0441 |
| 3 | 3 | sp\|Q8WVC0\|LEO1_HUMAN | LEO1 | 75.36 | 3.8904 |
| 3 | 3 | sp\|O15523\|DDX3Y_HUMAN | DDX3Y | 73.11 | 3.8037 |
| 3 | 3 | sp\|P55201\|BRPF1_HUMAN | BRPF1 | 137.41 | 3.7974 |
| 3 | 3 | sp\|Q15050\|RRS1_HUMAN | RRS1 | 41.17 | 3.7946 |
| 3 | 3 | sp\|P62316\|SMD2_HUMAN | SNRPD2 | 13.52 | 3.6706 |
| 3 | 3 | sp\|P38432\|COIL_HUMAN | COIL | 62.57 | 3.6496 |
| 3 | 3 | sp\|Q9P035\|HACD3_HUMAN | HACD3 | 43.13 | 3.5854 |
| 3 | 3 | sp\|Q9H8H0\|NOL11_HUMAN | NOL11 | 81.07 | 3.5795 |
| 3 | 3 | sp\|Q9HAF1\|EAF6_HUMAN | MEAF6 | 21.62 | 3.578 |
| 3 | 3 | sp\|Q8IWX8\|CHERP_HUMAN | CHERP | 103.64 | 3.5545 |
| 3 | 3 | sp\|Q9BUJ2\|HNRL1_HUMAN | HNRNPUL1 | 95.68 | 3.5307 |
| 3 | 3 | sp\|Q9H8H2\|DDX31_HUMAN | DDX31 | 94.03 | 3.4706 |
| 3 | 3 | sp\|O94880\|PHF14_HUMAN | PHF14 | 99.99 | 3.4646 |
| 3 | 3 | sp\|Q5JTH9\|RRP12_HUMAN | RRP12 | 143.61 | 3.4367 |
| 3 | 3 | sp\|P56537\|IF6_HUMAN | EIF6 | 26.58 | 3.4285 |
| 3 | 3 | sp\|Q9UKJ3\|GPTC8_HUMAN | GPATCH8 | 164.1 | 3.3578 |
| 3 | 3 | sp\|Q07020\|RL18_HUMAN | RPL18 | 21.62 | 3.3553 |
| 3 | 3 | sp\|P06748\|NPM_HUMAN | NPM1 | 32.55 | 3.329 |
| 3 | 3 | sp\|Q3ZCQ8\|TIM50_HUMAN | TIMM50 | 39.62 | 3.3211 |
| 3 | 3 | sp\|Q14781\|CBX2_HUMAN | CBX2 | 56.05 | 3.3022 |
| 3 | 3 | sp\|Q9H7B2\|RPF2_HUMAN | RPF2 | 35.56 | 3.2995 |
| 3 | 3 | sp\|Q9UBB9\|TFP11_HUMAN | TFIP11 | 96.76 | 3.2993 |
| 3 | 3 | sp\|P61247\|RS3A_HUMAN | RPS3A | 29.93 | 3.2546 |
| 3 | 3 | sp\|P35251\|RFC1_HUMAN | RFC1 | 128.18 | 3.2541 |
| 3 | 3 | sp\|Q99848\|EBP2_HUMAN | EBNA1BP2 | 34.83 | 3.2005 |
| 3 | 3 | sp\|P34931\|HS71L_HUMAN | HSPA1L | 70.33 | 3.1654 |
| 3 | 3 | sp\|O95831\|AIFM1_HUMAN | AIFM1 | 66.86 | 3.1432 |
| 3 | 3 | tr\|F8VXC8\|F8VXC8_HUMAN | SMARCC2 | 136.1 | 3.1344 |
| 3 | 3 | sp\|Q5VT52\|RPRD2_HUMAN | RPRD2 | 155.92 | 3.1314 |
| 3 | 3 | sp\|Q13206\|DDX10_HUMAN | DDX10 | 100.83 | 3.0819 |
| 3 | 3 | sp\|P62081\|RS7_HUMAN | RPS7 | 22.11 | 3.0752 |
| 3 | 3 | sp\|Q01831\|XPC_HUMAN | XPC | 105.89 | 3.0057 |
| 3 | 3 | sp\|O15226\|NKRF_HUMAN | NKRF | 77.62 | 3.0054 |
| 3 | 3 | sp\|Q92522\|H1X_HUMAN | H1FX | 22.47 | 2.9991 |
| 3 | 3 | sp\|Q8WXF0\|SRS12_HUMAN | SRSF12 | 30.49 | 2.9422 |
| 3 | 3 | sp\|Q9NRZ9\|HELLS_HUMAN | HELLS | 97.01 | 2.8286 |
| 3 | 3 | sp\|P62851\|RS25_HUMAN | RPS25 | 13.73 | 2.8129 |
| 3 | 3 | sp\|P46781\|RS9_HUMAN | RPS9 | 22.58 | 2.7809 |
| 3 | 3 | sp\|Q13428\|TCOF_HUMAN | TCOF1 | 152.02 | 2.6949 |
| 3 | 3 | sp\|Q9H501\|ESF1_HUMAN | ESF1 | 98.73 | 2.6558 |
| 3 | 3 | sp\|Q9BZJ0\|CRNL1_HUMAN | CRNKL1 | 100.39 | 2.5946 |
| 3 | 3 | sp\|Q99496\|RING2_HUMAN | RNF2 | 37.63 | 2.5349 |
| 3 | 3 | sp\|Q8NI36\|WDR36_HUMAN | WDR36 | 105.26 | 2.4894 |
| 3 | 3 | sp\|Q9Y2R9\|RT07_HUMAN | MRPS7 | 28.12 | 2.4687 |
| 3 | 3 | sp\|P62249\|RS16_HUMAN | RPS16 | 16.44 | 2.4589 |
| 3 | 3 | sp\|P53999\|TCP4_HUMAN | SUB1 | 14.39 | 2.4304 |
| 3 | 3 | sp\|Q13123\|RED_HUMAN | IK | 65.56 | 2.3999 |
| 3 | 3 | sp\|P30876\|RPB2_HUMAN | POLR2B | 133.81 | 2.367 |
| 3 | 3 | sp\|P62906\|RL10A_HUMAN | RPL10A | 24.82 | 2.2409 |
| 3 | 3 | sp\|Q96H22\|CENPN_HUMAN | CENPN | 39.53 | 2.2018 |
| 3 | 3 | sp\|Q96T37\|RBM15_HUMAN | RBM15 | 107.12 | 2.0773 |
| 2 | 3 | tr\|B2R5W2\|B2R5W2_HUMAN | HNRNPC | 31.93 | 5.509 |
| 2 | 3 | sp\|P67809\|YBOX1_HUMAN | YBX1 | 35.9 | 4.8382 |
| 2 | 3 | sp\|Q9Y5S9\|RBM8A_HUMAN | RBM8A | 19.88 | 3.4783 |
| 2 | 3 | sp\|Q9UIS9\|MBD1_HUMAN | MBD1 | 66.56 | 3.2337 |
| 2 | 3 | sp\|Q66PJ3\|AR6P4_HUMAN | ARL6IP4 | 44.89 | 3.2302 |
| 2 | 3 | sp\|P17661\|DESM_HUMAN | DES | 53.5 | 2.986 |
| 2 | 3 | sp\|P82650\|RT22_HUMAN | MRPS22 | 41.25 | 2.8833 |
| 2 | 3 | sp\|P04406\|G3P_HUMAN | GAPDH | 36.03 | 2.5682 |
| 2 | 3 | sp\|P22090\|RS4Y1_HUMAN | RPS4Y1 | 29.44 | 2.4726 |
| 1 | 3 | tr\|Q6PJV4\|Q6PJV4_HUMAN | THRAP3 | 41.83 | 4.322 |
| 2 | 2 | sp\|P49711\|CTCF_HUMAN | CTCF | 82.73 | 5.3155 |
| 2 | 2 | sp\|Q68CP9\|ARID2_HUMAN | ARID2 | 197.27 | 4.6815 |
| 2 | 2 | sp\|Q9GZL7\|WDR12_HUMAN | WDR12 | 47.68 | 4.5006 |
| 2 | 2 | sp\|Q96IZ7\|RSRC1_HUMAN | RSRC1 | 38.65 | 4.4356 |
| 2 | 2 | sp\|Q9UGU0\|TCF20_HUMAN | TCF20 | 211.64 | 4.4306 |
| 2 | 2 | sp\|P0DMV9\|HS71B_HUMAN | HSPA1B | 70.01 | 4.4149 |
| 2 | 2 | sp\|Q14669\|TRIPC_HUMAN | TRIP12 | 220.3 | 4.3086 |
| 2 | 2 | sp\|Q5UIP0\|RIF1_HUMAN | RIF1 | 274.29 | 4.3075 |
| 2 | 2 | sp\|O00267\|SPT5H_HUMAN | SUPT5H | 120.92 | 4.2498 |
| 2 | 2 | sp\|P05388\|RLA0_HUMAN | RPLP0 | 34.25 | 4.2162 |
| 2 | 2 | sp\|Q9BYN8\|RT26_HUMAN | MRPS26 | 24.2 | 4.1072 |
| 2 | 2 | sp\|Q5SRE5\|NU188_HUMAN | NUP188 | 195.92 | 4.0991 |
| 2 | 2 | sp\|Q15637\|SF01_HUMAN | SF1 | 68.29 | 4.0782 |
| 2 | 2 | sp\|Q96SB8\|SMC6_HUMAN | SMC6 | 126.25 | 3.9457 |
| 2 | 2 | sp\|P20226\|TBP_HUMAN | TBP | 37.67 | 3.9353 |
| 2 | 2 | sp\|Q96MU7\|YTDC1_HUMAN | YTHDC1 | 84.65 | 3.9179 |
| 2 | 2 | sp\|Q92665\|RT31_HUMAN | MRPS31 | 45.29 | 3.8434 |
| 2 | 2 | sp\|Q92552\|RT27_HUMAN | MRPS27 | 47.58 | 3.8003 |
| 2 | 2 | sp\|Q9NV31\|IMP3_HUMAN | IMP3 | 21.84 | 3.7393 |
| 2 | 2 | sp\|P04844\|RPN2_HUMAN | RPN2 | 69.24 | 3.7317 |
| 2 | 2 | sp\|Q32P51\|RA1L2_HUMAN | HNRNPA1L2 | 34.2 | 3.6858 |
| 2 | 2 | sp\|P05141\|ADT2_HUMAN | SLC25A5 | 32.83 | 3.6825 |
| 2 | 2 | sp\|Q8N1GO\|ZN687_HUMAN | ZNF687 | 129.45 | 3.6672 |
| 2 | 2 | sp\|Q96EY7\|PTCD3_HUMAN | PTCD3 | 78.5 | 3.6382 |
| 2 | 2 | sp\|O75494\|SRS10_HUMAN | SRSF10 | 31.28 | 3.634 |
| 2 | 2 | sp\|O75531\|BAF_HUMAN | BANF1 | 10.05 | 3.6281 |
| 2 | 2 | sp\|Q13427\|PPIG_HUMAN | PPIG | 88.56 | 3.6088 |
| 2 | 2 | tr\|A0A0A0MQS2\|A0A0A0MQS2_HUMAN | CLASRP | 77.12 | 3.5848 |
| 2 | 2 | sp\|Q9UNQ2\|DIM1_HUMAN | DIMT1 | 35.21 | 3.5846 |
| 2 | 2 | sp\|P39023\|RL3_HUMAN | RPL3 | 46.08 | 3.569 |
| 2 | 2 | sp\|P41219\|PERI_HUMAN | PRPH | 53.62 | 3.5672 |
| 2 | 2 | sp\|Q8WYH8\|ING5_HUMAN | ING5 | 27.73 | 3.5567 |
| 2 | 2 | sp\|Q15022\|SUZ12_HUMAN | SUZ12 | 83 | 3.543 |
| 2 | 2 | sp\|P26599\|PTBP1_HUMAN | PTBP1 | 57.19 | 3.5251 |
| 2 | 2 | sp\|P07196\|NFL_HUMAN | NEFL | 61.48 | 3.5125 |
| 2 | 2 | sp\|Q69YH5\|CDCA2_HUMAN | CDCA2 | 112.61 | 3.5117 |
| 2 | 2 | sp\|O95478\|NSA2_HUMAN | NSA2 | 30.05 | 3.5067 |
| 2 | 2 | sp\|O75151\|PHF2_HUMAN | PHF2 | 120.7 | 3.5008 |
| 2 | 2 | sp\|P49736\|MCM2_HUMAN | MCM2 | 101.83 | 3.4994 |
| 2 | 2 | sp\|P35637\|FUS_HUMAN | FUS | 53.39 | 3.4823 |
| 2 | 2 | sp\|P07437\|TBB5_HUMAN | TUBB | 49.64 | 3.4431 |
| 2 | 2 | sp\|Q9Y3A2\|UTP11_HUMAN | UTP11 | 30.43 | 3.4209 |
| 2 | 2 | sp\|Q8TDN6\|BRX1_HUMAN | BRIX1 | 41.37 | 3.3781 |
| 2 | 2 | sp\|Q9HCG8\|CWC22_HUMAN | CWC22 | 105.4 | 3.3528 |
| 2 | 2 | sp\|Q9NQ39\|RS10L_HUMAN | RPS10P5 | 20.11 | 3.3483 |
| 2 | 2 | sp\|Q9UJS0\|CMC2_HUMAN | SLC25A13 | 74.13 | 3.345 |
| 2 | 2 | sp\|Q6PK04\|CC137_HUMAN | CCDC137 | 33.21 | 3.344 |
| 2 | 2 | sp\|Q5T280\|CI114_HUMAN | SPOUT1 | 41.98 | 3.3243 |
| 2 | 2 | sp\|Q9UJV9\|DDX41_HUMAN | DDX41 | 69.79 | 3.3239 |
| 2 | 2 | sp\|Q9GZS3\|WDR61_HUMAN | WDR61 | 33.56 | 3.3203 |
| 2 | 2 | sp\|Q13084\|RM28_HUMAN | MRPL28 | 30.14 | 3.314 |
| 2 | 2 | sp\|Q9NPF5\|DMAP1_HUMAN | DMAP1 | 52.96 | 3.3061 |
| 2 | 2 | sp\|P82933\|RT09_HUMAN | MRPS9 | 45.81 | 3.2952 |
| 2 | 2 | sp\|Q9UGL1\|KDM5B_HUMAN | KDM5B | 175.54 | 3.2822 |
| 2 | 2 | sp\|Q5T3J3\|LRIF1_HUMAN | LRIF1 | 84.52 | 3.2788 |
| 2 | 2 | sp\|Q9GZR7\|DDX24_HUMAN | DDX24 | 96.27 | 3.2775 |
| 2 | 2 | sp\|P62304\|RUXE_HUMAN | SNRPE | 10.8 | 3.2748 |
| 2 | 2 | sp\|Q8N0S6\|CENPL_HUMAN | CENPL | 38.97 | 3.245 |
| 2 | 2 | sp\|Q14146\|URB2_HUMAN | URB2 | 170.43 | 3.1984 |
| 2 | 2 | sp\|Q02978\|M2OM_HUMAN | SLC25A11 | 34.04 | 3.1901 |
| 2 | 2 | sp\|Q9H6R0\|DHX33_HUMAN | DHX33 | 78.82 | 3.1845 |
| 2 | 2 | sp\|Q9HCD5\|NCOA5_HUMAN | NCOA5 | 65.5 | 3.1842 |
| 2 | 2 | sp\|Q86WX3\|AROS_HUMAN | RPS19BP1 | 15.42 | 3.1782 |
| 2 | 2 | sp\|Q9H4L4\|SENP3_HUMAN | SENP3 | 64.97 | 3.1604 |
| 2 | 2 | sp\|P61313\|RL15_HUMAN | RPL15 | 24.13 | 3.1313 |
| 2 | 2 | sp\|Q9BQF6\|SENP7_HUMAN | SENP7 | 119.58 | 3.1128 |
| 2 | 2 | sp\|P38646\|GRP75_HUMAN | HSPA9 | 73.63 | 3.1102 |
| 2 | 2 | sp\|Q5SY16\|NOL9_HUMAN | NOL9 | 79.27 | 3.107 |
| 2 | 2 | sp\|P07197\|NFM_HUMAN | NEFM | 102.41 | 3.1027 |
| 2 | 2 | sp\|P31942\|HNRH3_HUMAN | HNRNPH3 | 36.9 | 3.0985 |
| 2 | 2 | sp\|Q9Y265\|RUVB1_HUMAN | RUVBL1 | 50.2 | 3.0511 |
| 2 | 2 | sp\|Q9Y3B9\|RRP15_HUMAN | RRP15 | 31.46 | 3.0423 |
| 2 | 2 | sp\|Q9NSI2\|F207A_HUMAN | FAM207A | 25.44 | 3.0287 |
| 2 | 2 | sp\|Q6IQ32\|ADNP2_HUMAN | ADNP2 | 122.75 | 3.0046 |
| 2 | 2 | sp\|P55081\|MFAP1_HUMAN | MFAP1 | 51.93 | 2.9802 |
| 2 | 2 | sp\|P30050\|RL12_HUMAN | RPL12 | 17.81 | 2.9606 |
| 2 | 2 | sp\|O00257\|CBX4_HUMAN | CBX4 | 61.33 | 2.9486 |
| 2 | 2 | sp\|Q9BW27\|NUP85_HUMAN | NUP85 | 74.97 | 2.9405 |
| 2 | 2 | sp\|P83731\|RL24_HUMAN | RPL24 | 17.77 | 2.9294 |
| 2 | 2 | sp\|O95983\|MBD3_HUMAN | MBD3 | 32.82 | 2.9113 |
| 2 | 2 | sp\|P06576\|ATPB_HUMAN | ATP5B | 56.52 | 2.9104 |
| 2 | 2 | sp\|O75530\|EED_HUMAN | EED | 50.17 | 2.8773 |
| 2 | 2 | sp\|Q8NAV1\|PR38A_HUMAN | PRPF38A | 37.45 | 2.8489 |
| 2 | 2 | sp\|O60318\|GANP_HUMAN | MCM3AP | 218.27 | 2.8449 |
| 2 | 2 | sp\|Q02878\|RL6_HUMAN | RPL6 | 32.71 | 2.7827 |
| 2 | 2 | sp\|O94805\|ACL6B_HUMAN | ACTL6B | 46.85 | 2.773 |
| 2 | 2 | sp\|P08621\|RU17_HUMAN | SNRNP70 | 51.53 | 2.7581 |
| 2 | 2 | tr\|A0A096LNW1\|A0A096LNW1_HUMAN | ATRX | 106.9 | 2.7254 |
| 2 | 2 | sp\|P62318\|SMD3_HUMAN | SNRPD3 | 13.91 | 2.7076 |
| 2 | 2 | sp\|Q6P0N0\|M18BP_HUMAN | MIS18BP1 | 129.01 | 2.7046 |
| 2 | 2 | sp\|P13010\|XRCC5_HUMAN | XRCC5 | 82.65 | 2.6965 |
| 2 | 2 | sp\|P30414\|NKTR_HUMAN | NKTR | 165.58 | 2.6914 |
| 2 | 2 | sp\|P08574\|CY1_HUMAN | CYC1 | 35.4 | 2.6877 |
| 2 | 2 | sp\|Q9P1Y6\|PHRF1_HUMAN | PHRF1 | 178.56 | 2.5945 |
| 2 | 2 | sp\|Q9NW13\|RBM28_HUMAN | RBM28 | 85.68 | 2.5606 |
| 2 | 2 | sp\|P18847\|ATF3_HUMAN | ATF3 | 20.56 | 2.5504 |
| 2 | 2 | sp\|Q9UQ88\|CD11A_HUMAN | CDK11A | 91.31 | 2.4514 |
| 2 | 2 | sp\|Q9Y483\|MTF2_HUMAN | MTF2 | 67.06 | 2.3506 |
| 2 | 2 | sp\|Q9H6R4\|NOL6_HUMAN | NOL6 | 127.51 | 2.2599 |
| 2 | 2 | sp\|O00148\|DX39A_HUMAN | DDX39A | 49.1 | 2.1977 |
| 2 | 2 | sp\|Q9P2K5\|MYEF2_HUMAN | MYEF2 | 64.08 | 2.1848 |
| 1 | 2 | tr\|Q68E03\|Q68E03_HUMAN | DKFZp686L22104 | 30.92 | 5.1845 |
| 1 | 2 | sp\|Q16576\|RBBP7_HUMAN | RBBP7 | 47.79 | 3.3349 |
| 1 | 2 | sp\|Q9BYX7\|ACTBM_HUMAN | POTEKP | 41.99 | 3.1033 |
| 1 | 2 | sp\|P46777\|RL5_HUMAN | RPL5 | 34.34 | 2.8247 |
| 1 | 1 | sp\|O95299\|NDUAA_HUMAN | NDUFA10 | 40.72 | 5.8592 |
| 1 | 1 | tr\|A0A0M3HER2\|A0A0M3HER2_HUMAN | CENPV | 18.8 | 5.626 |
| 1 | 1 | sp\|P04280\|PRP1_HUMAN | PRB1 | 38.52 | 5.4758 |
| 1 | 1 | tr\|Q53GL6\|Q53GL6_HUMAN | RALY | 32.53 | 5.4233 |
| 1 | 1 | tr\|S4R341\|S4R341_HUMAN | NOLC1 | 8.05 | 5.3679 |
| 1 | 1 | sp\|Q9NW64\|RBM22_HUMAN | RBM22 | 46.87 | 5.1218 |
| 1 | 1 | sp\|Q9BYD2\|RM09_HUMAN | MRPL9 | 30.22 | 5.0825 |
| 1 | 1 | sp\|P46782\|RS5_HUMAN | RPS5 | 22.86 | 5.0071 |
| 1 | 1 | sp\|Q9NZM5\|GSCR2_HUMAN | GLTSCR2 | 54.36 | 4.9887 |
| 1 | 1 | sp\|Q92804\|RBP56_HUMAN | TAF15 | 61.79 | 4.88 |
| 1 | 1 | sp\|Q6NSZ9\|ZSC25_HUMAN | ZSCAN25 | 61.44 | 4.8752 |
| 1 | 1 | sp\|P16989\|YBOX3_HUMAN | YBX3 | 40.07 | 4.8301 |
| 1 | 1 | tr\|Q6IPH7\|Q61PH7_HUMAN | RPL14 | 23.77 | 4.7072 |
| 1 | 1 | sp\|Q9BQ04\|RBM4B_HUMAN | RBM4B | 40.12 | 4.7065 |
| 1 | 1 | sp\|Q9HCK1\|ZDBF2_HUMAN | ZDBF2 | 265.45 | 4.7004 |
| 1 | 1 | sp\|Q5T653\|RM02_HUMAN | MRPL2 | 33.28 | 4.6443 |
| 1 | 1 | sp\|P62136\|PP1A_HUMAN | PPP1CA | 37.49 | 4.5999 |
| 1 | 1 | sp\|Q92782\|DPF1_HUMAN | DPF1 | 42.47 | 4.5393 |
| 1 | 1 | sp\|Q13151\|ROAO_HUMAN | HNRNPA0 | 30.82 | 4.5336 |
| 1 | 1 | sp\|P35232\|PHB_HUMAN | PHB | 29.79 | 4.5324 |
| 1 | 1 | sp\|Q9BTC0\|DIDO1_HUMAN | DIDO1 | 243.72 | 4.5276 |
| 1 | 1 | sp\|Q9Y230\|RUVB2_HUMAN | RUVBL2 | 51.12 | 4.517 |
| 1 | 1 | sp\|P82673\|RT35_HUMAN | MRPS35 | 36.82 | 4.5017 |
| 1 | 1 | sp\|Q99567\|NUP88_HUMAN | NUP88 | 83.49 | 4.4729 |
| 1 | 1 | sp\|P05412\|JUN_HUMAN | JUN | 35.65 | 4.4638 |
| 1 | 1 | sp\|Q8NDX5\|PHC3_HUMAN | PHC3 | 106.1 | 4.4539 |
| 1 | 1 | sp\|P50914\|RL14_HUMAN | RPL14 | 23.42 | 4.3217 |
| 1 | 1 | sp\|O60506\|HNRPQ_HUMAN | SYNCRIP | 69.56 | 4.2631 |
| 1 | 1 | sp\|Q14974\|IMB1_HUMAN | KPNB1 | 97.11 | 4.2381 |
| 1 | 1 | sp\|P62913\|RL11_HUMAN | RPL11 | 20.24 | 4.2253 |
| 1 | 1 | sp\|O95391\|SLU7_HUMAN | SLU7 | 68.34 | 4.215 |
| 1 | 1 | sp\|P09234\|RU1C_HUMAN | SNRPC | 17.38 | 4.2105 |
| 1 | 1 | tr\|A8K7N0\|A8K7N0_HUMAN | | 23.63 | 4.193 |
| 1 | 1 | tr\|B2RC06\|B2RC06_HUMAN | | 39.25 | 4.162 |
| 1 | 1 | sp\|Q8TBK6\|ZCH10_HUMAN | ZCCHC10 | 20.95 | 4.1487 |
| 1 | 1 | sp\|Q9UBB5\|MBD2_HUMAN | MBD2 | 43.23 | 4.1327 |
| 1 | 1 | IGKC_MOUSE | | 11.77 | 4.1063 |
| 1 | 1 | sp\|P37198\|NUP62_HUMAN | NUP62 | 53.22 | 4.0927 |
| 1 | 1 | sp\|P35579\|MYH9_HUMAN | MYH9 | 226.39 | 4.0738 |
| 1 | 1 | sp\|P22695\|QCR2_HUMAN | UQCRC2 | 48.41 | 4.0303 |
| 1 | 1 | sp\|P07355\|ANXA2_HUMAN | ANXA2 | 38.58 | 4.0038 |
| 1 | 1 | sp\|O15381\|NVL_HUMAN | NVL | 94.99 | 3.9989 |
| 1 | 1 | sp\|Q07157\|ZO1_HUMAN | TJP1 | 195.34 | 3.9914 |
| 1 | 1 | sp\|Q9Y3C1\|NOP16_HUMAN | NOP16 | 21.18 | 3.9883 |
| 1 | 1 | sp\|Q9Y625\|GPC6_HUMAN | GPC6 | 62.69 | 3.9801 |
| 1 | 1 | tr\|B2RWN5\|B2RWN5_HUMAN | HEATR1 | 242.11 | 3.9638 |
| 1 | 1 | sp\|Q15910\|EZH2_HUMAN | EZH2 | 85.31 | 3.9454 |
| 1 | 1 | sp\|Q9NQV6\|PRD10_HUMAN | PRDM10 | 130.05 | 3.9287 |
| 1 | 1 | sp\|Q8TF76\|HASP_HUMAN | GSG2 | 88.44 | 3.8857 |
| 1 | 1 | sp\|Q9Y3B4\|SF3B6_HUMAN | SF3B6 | 14.58 | 3.8364 |
| 1 | 1 | sp\|P62314\|SMD1_HUMAN | SNRPD1 | 13.27 | 3.8351 |
| 1 | 1 | tr\|Q6FI97\|Q6FI97_HUMAN | BAF53A | 47.35 | 3.8176 |
| 1 | 1 | sp\|Q9P013\|CWC15_HUMAN | CWC15 | 26.61 | 3.8025 |
| 1 | 1 | sp\|P62899\|RL31_HUMAN | RPL31 | 14.45 | 3.7783 |
| 1 | 1 | sp\|P82663\|RT25_HUMAN | MRPS25 | 20.1 | 3.7565 |
| 1 | 1 | sp\|P35249\|RFC4_HUMAN | RFC4 | 39.66 | 3.7202 |
| 1 | 1 | sp\|P49759\|CLK1_HUMAN | CLK1 | 57.25 | 3.7089 |
| 1 | 1 | sp\|Q9NVH1\|DJC11_HUMAN | DNAJC11 | 63.24 | 3.7074 |
| 1 | 1 | sp\|Q9UHR5\|S30BP_HUMAN | SAP30BP | 33.85 | 3.691 |
| 1 | 1 | tr\|B0UZZ8\|B0UZZ8_HUMAN | C6orf11 | 68 | 3.6905 |
| 1 | 1 | sp\|Q8N9T8\|KRI1_HUMAN | KRI1 | 82.55 | 3.6636 |
| 1 | 1 | sp\|P51991\|ROA3_HUMAN | HNRNPA3 | 39.57 | 3.6618 |
| 1 | 1 | sp\|O14880\|MGST3_HUMAN | MGST3 | 16.51 | 3.6611 |
| 1 | 1 | tr\|Q05CW7\|Q05CW7_HUMAN | NAT10 | 62.35 | 3.6602 |
| 1 | 1 | sp\|O75934\|SPF27_HUMAN | BCAS2 | 26.11 | 3.6364 |
| 1 | 1 | sp\|Q8NHW5\|RLA0L_HUMAN | RPLP0P6 | 34.34 | 3.6321 |
| 1 | 1 | sp\|Q9NQ50\|RM40_HUMAN | MRPL40 | 24.48 | 3.629 |
| 1 | 1 | sp\|P12235\|ADT1_HUMAN | SLC25A4 | 33.04 | 3.6148 |
| 1 | 1 | sp\|O14519\|CDKA1_HUMAN | CDK2AP1 | 12.36 | 3.6134 |
| 1 | 1 | sp\|Q96EP5\|DAZP1_HUMAN | DAZAP1 | 43.36 | 3.6108 |
| 1 | 1 | sp\|Q9NYK5\|RM39_HUMAN | MRPL39 | 38.69 | 3.5747 |
| 1 | 1 | sp\|P05023\|AT1A1_HUMAN | ATP1A1 | 112.82 | 3.565 |
| 1 | 1 | sp\|P35250\|RFC2_HUMAN | RFC2 | 39.13 | 3.526 |
| 1 | 1 | sp\|Q9Y676\|RT18B_HUMAN | MRPS18B | 29.38 | 3.5192 |
| 1 | 1 | sp\|O94832\|MYO1D_HUMAN | MYO1D | 116.13 | 3.5141 |
| 1 | 1 | sp\|O60762\|DPM1_HUMAN | DPM1 | 29.62 | 3.5123 |
| 1 | 1 | sp\|Q9UBU9\|NXF1_HUMAN | NXF1 | 70.14 | 3.5123 |
| 1 | 1 | sp\|Q96JM3\|CHAP1_HUMAN | CHAMP1 | 89.04 | 3.5122 |
| 1 | 1 | sp\|Q9BYD3\|RM04_HUMAN | MRPL4 | 34.9 | 3.4916 |
| 1 | 1 | sp\|Q9H7H0\|MET17_HUMAN | METTL17 | 50.7 | 3.483 |
| 1 | 1 | sp\|Q9NX24\|NHP2_HUMAN | NHP2 | 17.19 | 3.472 |
| 1 | 1 | tr\|Q562V5\|Q562V5_HUMAN | ACT | 11.42 | 3.4708 |
| 1 | 1 | sp\|Q9Y5Q9\|TF3C3_HUMAN | GTF3C3 | 101.21 | 3.4705 |
| 1 | 1 | sp\|Q9ULU4\|PKCB1_HUMAN | ZMYND8 | 131.61 | 3.4689 |
| 1 | 1 | sp\|Q9HBE1\|PATZ1_HUMAN | PATZ1 | 74.01 | 3.4686 |
| 1 | 1 | sp\|P51571\|SSRD_HUMAN | SSR4 | 18.99 | 3.4601 |
| 1 | 1 | sp\|Q06587\|RING1_HUMAN | RING1 | 42.4 | 3.4513 |
| 1 | 1 | sp\|O14795\|UN13B_HUMAN | UNC13B | 180.56 | 3.4394 |
| 1 | 1 | sp\|P33992\|MCM5_HUMAN | MCM5 | 82.23 | 3.3963 |
| 1 | 1 | sp\|Q13148\|TADBP_HUMAN | TARDBP | 44.71 | 3.3906 |
| 1 | 1 | sp\|Q8WY36\|BBX_HUMAN | BBX | 105.06 | 3.3426 |
| 1 | 1 | sp\|Q86X18\|CS068_HUMAN | C19orf68 | 70.03 | 3.3403 |
| 1 | 1 | tr\|B7Z8Y3\|B7Z8Y3_HUMAN | | 106.95 | 3.3372 |
| 1 | 1 | sp\|Q8NDF8\|PAPD5_HUMAN | PAPD5 | 63.23 | 3.3133 |
| 1 | 1 | sp\|P32119\|PRDX2_HUMAN | PRDX2 | 21.88 | 3.312 |
| 1 | 1 | sp\|Q96SK2\|TM209_HUMAN | TMEM209 | 62.88 | 3.3026 |
| 1 | 1 | tr\|D3DTH7\|D3DTH7_HUMAN | MYO1C | 98.87 | 3.2974 |
| 1 | 1 | tr\|B4DR34\|B4DR34_HUMAN | | 36.86 | 3.2621 |
| 1 | 1 | sp\|Q9NP66\|HM20A_HUMAN | HMG20A | 40.12 | 3.2532 |
| 1 | 1 | sp\|O75955\|FLOT1_HUMAN | FLOT1 | 47.33 | 3.2455 |
| 1 | 1 | sp\|Q96GN5\|CDA7L_HUMAN | CDCA7L | 52.17 | 3.2347 |
| 1 | 1 | sp\|Q7Z6E9\|RBBP6_HUMAN | RBBP6 | 201.44 | 3.2342 |
| 1 | 1 | sp\|A8CG34\|P121C_HUMAN | POM121C | 124.98 | 3.2079 |
| 1 | 1 | sp\|P41208\|CETN2_HUMAN | CETN2 | 19.73 | 3.2075 |
| 1 | 1 | sp\|P62829\|RL23_HUMAN | RPL23 | 14.86 | 3.2074 |
| 1 | 1 | sp\|Q9NXE4\|NSMA3_HUMAN | SMPD4 | 93.29 | 3.2044 |
| 1 | 1 | sp\|Q86Y91\|KI18B_HUMAN | KIF18B | 94.16 | 3.1821 |
| 1 | 1 | sp\|Q6DRA6\|H2B2D_HUMAN | HIST2H2BD | 18.01 | 3.1771 |
| 1 | 1 | sp\|P62263\|RS14_HUMAN | RPS14 | 16.26 | 3.1597 |
| 1 | 1 | sp\|Q9UHX1\|PUF60_HUMAN | PUF60 | 59.84 | 3.1255 |
| 1 | 1 | sp\|E9PRG8\|CK098_HUMAN | C11orf98 | 13.79 | 3.1088 |
| 1 | 1 | sp\|Q75QN2\|INT8_HUMAN | INTS8 | 113.02 | 3.1011 |
| 1 | 1 | sp\|Q58FF8\|H90B2_HUMAN | HSP90AB2P | 44.32 | 3.0769 |
| 1 | 1 | sp\|O75477\|ERLN1_HUMAN | ERLIN1 | 38.9 | 3.0624 |
| 1 | 1 | sp\|Q15843\|NEDD8_HUMAN | NEDD8 | 9.07 | 3.0468 |
| 1 | 1 | sp\|Q15365\|PCBP1_HUMAN | PCBP1 | 37.47 | 3.0189 |
| 1 | 1 | sp\|P0DMR1\|HNRC4_HUMAN | HNRNPCL4 | 32.01 | 3.0131 |
| 1 | 1 | sp\|Q9ULV3\|CIZ1_HUMAN | CIZ1 | 99.98 | 3.0112 |
| 1 | 1 | sp\|P00558\|PGK1_HUMAN | PGK1 | 44.59 | 3.0094 |
| 1 | 1 | sp\|Q8TE59\|ATS19_HUMAN | ADAMTS19 | 133.96 | 3.0037 |
| 1 | 1 | sp\|Q8NAP3\|ZBT38_HUMAN | ZBTB38 | 134.17 | 2.9639 |
| 1 | 1 | KV2A7_MOUSE | | 12.27 | 2.9512 |
| 1 | 1 | sp\|Q8IXKO\|PHC2_HUMAN | PHC2 | 90.66 | 2.9338 |
| 1 | 1 | sp\|O60341\|KDM1A_HUMAN | KDM1A | 92.84 | 2.9303 |
| 1 | 1 | sp\|Q9Y6F7\|CDY2_HUMAN | CDY2A | 60.49 | 2.9091 |
| 1 | 1 | sp\|O95235\|KI20A_HUMAN | KIF20A | 100.22 | 2.8771 |
| 1 | 1 | sp\|Q9UJZ1\|STML2_HUMAN | STOML2 | 38.51 | 2.8728 |
| 1 | 1 | sp\|P04843\|RPN1_HUMAN | RPN1 | 68.53 | 2.868 |
| 1 | 1 | sp\|Q9BVA1\|TBB2B_HUMAN | TUBB2B | 49.92 | 2.8339 |
| 1 | 1 | sp\|P43246\|MSH2_HUMAN | MSH2 | 104.68 | 2.8127 |
| 1 | 1 | sp\|Q8WUB8\|PHF10_HUMAN | PHF10 | 56.02 | 2.7847 |
| 1 | 1 | sp\|Q5JVF3\|PCID2_HUMAN | PCID2 | 46 | 2.7464 |
| 1 | 1 | sp\|Q9Y3Y2\|CHTOP_HUMAN | CHTOP | 26.38 | 2.714 |
| 1 | 1 | sp\|Q9Y2X9\|ZN281_HUMAN | ZNF281 | 96.85 | 2.6924 |
| 1 | 1 | sp\|Q53GQ0\|DHB12_HUMAN | HSD17B12 | 34.3 | 2.6858 |
| 1 | 1 | tr\|A0A024R5M9\|A0A024R5M9_HUMAN | NUMA1 | 236.37 | 2.6796 |
| 1 | 1 | sp\|P17010\|ZFX_HUMAN | ZFX | 90.46 | 2.6696 |
| 1 | 1 | sp\|P54652\|HSP72_HUMAN | HSPA2 | 69.98 | 2.6579 |
| 1 | 1 | sp\|Q9UKD2\|MRT4_HUMAN | MRTO4 | 27.54 | 2.6442 |
| 1 | 1 | sp\|P12273\|PIP_HUMAN | PIP | 16.56 | 2.6385 |
| 1 | 1 | sp\|Q14151\|SAFB2_HUMAN | SAFB2 | 107.41 | 2.6256 |
| 1 | 1 | sp\|Q9UHA3\|RLP24_HUMAN | RSL24D1 | 19.61 | 2.6188 |
| 1 | 1 | sp\|Q5H9F3\|BCORL_HUMAN | BCORL1 | 182.41 | 2.5997 |
| 1 | 1 | sp\|Q8NDD1\|CA131_HUMAN | C1orf131 | 32.75 | 2.5842 |
| 1 | 1 | sp\|Q9NWU5\|RM22_HUMAN | MRPL22 | 23.63 | 2.5746 |
| 1 | 1 | sp\|Q9NZ01\|TECR_HUMAN | TECR | 36.01 | 2.5526 |
| 1 | 1 | sp\|Q16352\|AINX_HUMAN | INA | 55.36 | 2.5377 |
| 1 | 1 | sp\|O15504\|NUPL2_HUMAN | NUPL2 | 44.84 | 2.5352 |
| 1 | 1 | sp\|Q9NR22\|ANM8_HUMAN | PRMT8 | 45.26 | 2.5291 |
| 1 | 1 | sp\|P68871\|HBB_HUMAN | HBB | 15.99 | 2.5078 |
| 1 | 1 | sp\|Q5SNT2\|TM201_HUMAN | TMEM201 | 72.19 | 2.4788 |
| 1 | 1 | sp\|P46776\|RL27A_HUMAN | RPL27A | 16.55 | 2.3924 |
| 1 | 1 | sp\|P13639\|EF2_HUMAN | EEF2 | 95.28 | 2.3879 |
| 1 | 1 | sp\|Q8NDX1\|PSD4_HUMAN | PSD4 | 116.18 | 2.347 |
| 1 | 1 | sp\|P62861\|RS30_HUMAN | FAU | 6.64 | 2.3442 |
| 1 | 1 | sp\|P13804\|ETFA_HUMAN | ETFA | 35.06 | 2.3145 |
| 1 | 1 | sp\|Q9NV06\|DCA13_HUMAN | DCAF13 | 51.37 | 2.3115 |
| 1 | 1 | sp\|O75190\|DNJB6_HUMAN | DNAJB6 | 36.06 | 2.3041 |
| 1 | 1 | sp\|P62857\|RS28_HUMAN | RPS28 | 7.84 | 2.2822 |
| 1 | 1 | sp\|Q9NY93\|DDX56_HUMAN | DDX56 | 61.55 | 2.2165 |
| 1 | 1 | sp\|P51784\|UBP11_HUMAN | USP11 | 109.75 | 2.2148 |
| 1 | 1 | sp\|Q9NVH2\|INT7_HUMAN | INTS7 | 106.77 | 2.2143 |
| 1 | 1 | sp\|O60673\|REV3L_HUMAN | REV3L | 352.55 | 2.2069 |
| 1 | 1 | sp\|Q9P015\|RM15_HUMAN | MRPL15 | 33.4 | 2.2064 |
| 1 | 1 | sp\|P61353\|RL27_HUMAN | RPL27 | 15.79 | 2.1707 |
| 1 | 1 | sp\|O75323\|NIPS2_HUMAN | NIPSNAP2 | 33.72 | 2.1553 |
| 1 | 1 | tr\|Q9UMG4\|Q9UMG4_HUMAN | hANK1 | 3.65 | 2.1374 |
| 1 | 1 | sp\|Q8IXM6\|NRM_HUMAN | NRM | 29.36 | 2.1313 |

TABLE 5B
HA-SS18SSX1_NE_peptides

| Unique | Total | reference | Gene Symbol | MWT(kDa) | AVG |
|---|---|---|---|---|---|
| 48 | 308 | sp\|P51532\|SMCA4_HUMAN | SMARCA4 | 184.53 | 2.8323 |
| 71 | 221 | sp\|O14497\|ARI1A_HUMAN | ARID1A | 241.89 | 3.2897 |
| 60 | 221 | sp\|P51531\|SMCA2_HUMAN | SMARCA2 | 181.17 | 2.9484 |
| 37 | 213 | sp\|Q92922\|SMRC1_HUMAN | SMARCC1 | 122.79 | 2.94 |
| 51 | 174 | sp\|Q8TAQ2\|SMRC2_HUMAN | SMARCC2 | 132.8 | 2.952 |
| 52 | 108 | sp\|Q8NFD5\|ARI1B_HUMAN | ARID1B | 235.97 | 3.1352 |
| 27 | 94 | sp\|Q96GM5\|SMRD1_HUMAN | SMARCD1 | 58.2 | 3.4459 |
| 78 | 89 | sp\|P78527\|PRKDC_HUMAN | PRKDC | 468.79 | 3.2311 |
| 34 | 89 | sp\|Q9NZM4\|BICRA_HUMAN | BICRA | 158.39 | 3.2316 |
| 26 | 77 | sp\|Q969G3\|SMCE1_HUMAN | SMARCE1 | 46.62 | 3.4283 |
| 28 | 75 | sp\|Q6STE5\|SMRD3_HUMAN | SMARCD3 | 54.98 | 2.9487 |
| 19 | 74 | sp\|O96019\|ACL6A_HUMAN | ACTL6A | 47.43 | 3.1679 |
| 21 | 46 | sp\|Q92925\|SMRD2_HUMAN | SMARCD2 | 58.88 | 3.1179 |
| 20 | 46 | sp\|P49411\|EFTU_HUMAN | TUFM | 49.51 | 2.681 |
| 10 | 46 | sp\|P62736\|ACTA_HUMAN | ACTA2 | 41.98 | 2.4533 |
| 16 | 45 | sp\|Q12824\|SNF5_HUMAN | SMARCB1 | 44.11 | 2.9132 |
| 7 | 41 | sp\|P63261\|ACTG_HUMAN | ACTG1 | 41.77 | 3.2375 |
| 24 | 40 | sp\|Q9H8M2\|BRD9_HUMAN | BRD9 | 66.96 | 3.3845 |
| 24 | 39 | sp\|P25705\|ATPA_HUMAN | ATP5A1 | 59.71 | 3.347 |
| 14 | 35 | sp\|Q92785\|REQU_HUMAN | DPF2 | 44.13 | 3.6206 |
| 23 | 34 | sp\|Q9UJS0\|CMC2_HUMAN | SLC25A13 | 74.13 | 3.1068 |
| 14 | 31 | sp\|P12236\|ADT3_HUMAN | SLC25A6 | 32.85 | 2.5554 |
| 15 | 30 | sp\|P52272\|HNRPM_HUMAN | HNRNPM | 77.46 | 3.2894 |
| 22 | 25 | sp\|P06576\|ATPB_HUMAN | ATP5B | 56.52 | 3.6483 |
| 24 | 24 | sp\|O75643\|U520_HUMAN | SNRNP200 | 244.35 | 3.1225 |
| 23 | 23 | sp\|Q14980\|NUMA1_HUMAN | NUMA1 | 238.12 | 3.7937 |
| 23 | 23 | sp\|Q14204\|DYHC1_HUMAN | DYNC1H1 | 532.07 | 3.2127 |
| 18 | 23 | sp\|P05023\|AT1A1_HUMAN | ATP1A1 | 112.82 | 3.7257 |
| 15 | 23 | sp\|O95831\|AIFM1_HUMAN | AIFM1 | 66.86 | 3.2173 |
| 12 | 23 | sp\|P50402\|EMD_HUMAN | EMD | 28.98 | 2.7585 |
| 12 | 22 | sp\|P68371\|TBB4B_HUMAN | TUBB4B | 49.8 | 3.5227 |
| 10 | 22 | sp\|Q00325\|MPCP_HUMAN | SLC25A3 | 40.07 | 2.6968 |
| 16 | 21 | sp\|Q08211\|DHX9_HUMAN | DHX9 | 140.87 | 2.9913 |
| 14 | 21 | sp\|P11021\|GRP78_HUMAN | HSPA5 | 72.29 | 3.2487 |
| 2 | 21 | sp\|Q15532\|SSXT_HUMAN | SS18 | 45.9 | 2.4719 |
| 15 | 20 | sp\|P38646\|GRP75_HUMAN | HSPA9 | 73.63 | 3.5062 |
| 7 | 20 | sp\|Q4VC05\|BCL7A_HUMAN | BCL7A | 22.8 | 3.3097 |
| 18 | 19 | sp\|P52701\|MSH6_HUMAN | MSH6 | 152.69 | 3.4726 |
| 11 | 19 | sp\|Q6AI39\|BICRL_HUMAN | BICRAL | 115.01 | 3.2661 |
| 9 | 19 | sp\|P68104\|EF1A1_HUMAN | EEF1A1 | 50.11 | 3.1829 |
| 16 | 18 | sp\|P09874\|PARP1_HUMAN | PARP1 | 113.01 | 3.0283 |
| 16 | 18 | sp\|Q10570\|CPSF1_HUMAN | CPSF1 | 160.78 | 2.7977 |
| 16 | 17 | sp\|P20700\|LMNB1_HUMAN | LMNB1 | 66.37 | 3.3547 |
| 15 | 17 | sp\|Q16891\|MIC60_HUMAN | IMMT | 83.63 | 3.5711 |
| 16 | 16 | sp\|Q8N1F7\|NUP93_HUMAN | NUP93 | 93.43 | 3.0683 |
| 13 | 16 | sp\|P40939\|ECHA_HUMAN | HADHA | 82.95 | 3.3237 |
| 13 | 16 | sp\|O00567\|NOP56_HUMAN | NOP56 | 66.01 | 3.1798 |
| 9 | 16 | sp\|P62805\|H4_HUMAN | HIST1H4A | 11.36 | 3.0197 |
| 14 | 15 | sp\|P42704\|LPPRC_HUMAN | LRPPRC | 157.81 | 3.2864 |
| 13 | 15 | sp\|Q9UJV9\|DDX41_HUMAN | DDX41 | 69.79 | 2.6016 |
| 5 | 15 | sp\|Q71DI3\|H32_HUMAN | HIST2H3A | 15.38 | 1.934 |
| 14 | 14 | sp\|Q6P2Q9\|PRP8_HUMAN | PRPF8 | 273.43 | 2.9384 |
| 13 | 14 | sp\|Q9NVI7\|ATD3A_HUMAN | ATAD3A | 71.32 | 3.1974 |
| 13 | 14 | sp\|Q92621\|NU205_HUMAN | NUP205 | 227.78 | 3.1896 |
| 7 | 14 | sp\|Q8WUZ0\|BCL7C_HUMAN | BCL7C | 23.45 | 3.5497 |
| 13 | 13 | sp\|Q9Y4W6\|AFG32_HUMAN | AFG3L2 | 88.53 | 3.0599 |
| 13 | 13 | sp\|Q9BUQ8\|DDX23_HUMAN | DDX23 | 95.52 | 3.0451 |
| 12 | 13 | sp\|Q9C0J8\|WDR33_HUMAN | WDR33 | 145.8 | 3.3842 |
| 11 | 13 | sp\|Q96A33\|CCD47_HUMAN | CCDC47 | 55.84 | 3.3429 |
| 9 | 13 | sp\|P43243\|MATR3_HUMAN | MATR3 | 94.56 | 2.9462 |
| 12 | 12 | sp\|P04844\|RPN2_HUMAN | RPN2 | 69.24 | 3.9026 |
| 12 | 12 | sp\|Q9Y5B6\|PAXB1_HUMAN | PAXBP1 | 104.74 | 3.5313 |
| 12 | 12 | sp\|A0FGR8\|ESYT2_HUMAN | ESYT2 | 102.29 | 3.287 |
| 10 | 12 | sp\|O75746\|CMC1_HUMAN | SLC25A12 | 74.71 | 3.0669 |
| 6 | 12 | sp\|P55795\|HNRH2_HUMAN | HNRNPH2 | 49.23 | 3.0612 |
| 5 | 12 | sp\|Q96KK5\|H2A1H_HUMAN | HIST1H2AH | 13.9 | 2.5583 |
| 2 | 12 | sp\|P05141\|ADT2_HUMAN | SLC25A5 | 32.83 | 3.4462 |
| 11 | 11 | sp\|Q15029\|U5S1_HUMAN | EFTUD2 | 109.37 | 3.6326 |
| 11 | 11 | sp\|Q02978\|M2OM_HUMAN | SLC25A11 | 34.04 | 3.5222 |
| 10 | 11 | sp\|Q9Y2X3\|NOP58_HUMAN | NOP58 | 59.54 | 4.2232 |
| 10 | 11 | sp\|Q7L0Y3\|MRRP1_HUMAN | TRMT10C | 47.32 | 2.9714 |
| 9 | 11 | sp\|P22695\|QCR2_HUMAN | UQCRC2 | 48.41 | 3.5992 |
| 9 | 11 | sp\|Q9BQE3\|TBA1C_HUMAN | TUBA1C | 49.86 | 3.3342 |
| 9 | 11 | sp\|Q53GQ0\|DHB12_HUMAN | HSD17B12 | 34.3 | 3.2769 |
| 9 | 11 | sp\|Q6UN15\|FIP1_HUMAN | FIP1L1 | 66.49 | 3.1953 |
| 9 | 11 | sp\|Q9H9B4\|SFXN1_HUMAN | SFXN1 | 35.6 | 3.0828 |
| 8 | 11 | sp\|O75306\|NDUS2_HUMAN | NDUFS2 | 52.51 | 3.1642 |
| 5 | 11 | sp\|P33778\|H2B1B_HUMAN | HIST1H2BB | 13.94 | 2.5844 |
| 10 | 10 | sp\|O14980\|XPO1_HUMAN | XPO1 | 123.31 | 3.5888 |
| 10 | 10 | sp\|Q6NUK1\|SCMC1_HUMAN | SLC25A24 | 53.32 | 3.4159 |
| 10 | 10 | sp\|P04181\|OAT_HUMAN | OAT | 48.5 | 3.4156 |
| 10 | 10 | sp\|Q96I99\|SUCB2_HUMAN | SUCLG2 | 46.48 | 3.3701 |
| 10 | 10 | sp\|Q86WJ1\|CHD1L_HUMAN | CHD1L | 100.92 | 3.2369 |
| 10 | 10 | sp\|P10809\|CH60_HUMAN | HSPD1 | 61.02 | 2.9893 |
| 10 | 10 | sp\|Q9UBB9\|TFP11_HUMAN | TFIP11 | 96.76 | 2.8601 |
| 10 | 10 | sp\|Q9BQG0\|MBB1A_HUMAN | MYBBP1A | 148.76 | 2.733 |
| 4 | 10 | sp\|Q16384\|SSX1_HUMAN | SSX1 | 21.92 | 3.3189 |
| 4 | 10 | IGH1M_MOUSE | lghg1 | 43.36 | 2.7234 |
| 9 | 9 | sp\|Q96TA2\|YMEL1_HUMAN | YME1L1 | 86.4 | 4.2777 |
| 9 | 9 | sp\|P30837\|AL1B1_HUMAN | ALDH1B1 | 57.17 | 4.1396 |
| 9 | 9 | sp\|P35251\|RFC1_HUMAN | RFC1 | 128.18 | 3.6089 |
| 9 | 9 | sp\|Q16822\|PCKGM_HUMAN | PCK2 | 70.68 | 3.2754 |
| 9 | 9 | sp\|Q9NTI5\|PDS5B_HUMAN | PDS5B | 164.56 | 2.6945 |
| 8 | 9 | sp\|P11142\|HSP7C_HUMAN | HSPA8 | 70.85 | 3.7908 |
| 8 | 9 | sp\|Q12769\|NU160_HUMAN | NUP160 | 162.02 | 3.4687 |
| 8 | 9 | sp\|Q15758\|AAAT_HUMAN | SLC1A5 | 56.56 | 3.2819 |
| 8 | 9 | sp\|P55084\|ECHB_HUMAN | HADHB | 51.26 | 3.1472 |
| 7 | 9 | sp\|P21796\|VDAC1_HUMAN | VDAC1 | 30.75 | 3.0601 |
| 7 | 9 | sp\|Q9P035\|HACD3_HUMAN | HACD3 | 43.13 | 2.84 |
| 6 | 9 | sp\|Q5T280\|CI114_HUMAN | SPOUT1 | 41.98 | 3.0837 |
| 6 | 9 | sp\|P22087\|FBRL_HUMAN | FBL | 33.76 | 2.914 |
| 6 | 9 | sp\|P36542\|ATPG_HUMAN | ATP5C1 | 32.98 | 2.6524 |
| 6 | 9 | sp\|Q9P2R7\|SUCB1_HUMAN | SUCLA2 | 50.29 | 2.518 |
| 8 | 8 | sp\|Q29RF7\|PDS5A_HUMAN | PDS5A | 150.73 | 3.8078 |
| 8 | 8 | sp\|P11310\|ACADM_HUMAN | ACADM | 46.56 | 3.2564 |
| 8 | 8 | sp\|Q9NUL7\|DDX28_HUMAN | DDX28 | 59.54 | 3.2067 |
| 8 | 8 | sp\|Q92841\|DDX17_HUMAN | DDX17 | 80.22 | 3.1678 |
| 8 | 8 | sp\|P50570\|DYN2_HUMAN | DNM2 | 98 | 3.0011 |
| 8 | 8 | sp\|Q5SRE5\|NU188_HUMAN | NUP188 | 195.92 | 2.437 |
| 7 | 8 | sp\|P16615\|AT2A2_HUMAN | ATP2A2 | 114.68 | 3.0714 |
| 7 | 8 | sp\|Q8N8A6\|DDX51_HUMAN | DDX51 | 72.41 | 3.0036 |
| 6 | 8 | sp\|Q15637\|SF01_HUMAN | SF1 | 68.29 | 3.1692 |
| 6 | 8 | sp\|P53985\|MOT1_HUMAN | SLC16A1 | 53.91 | 2.686 |
| 7 | 7 | sp\|Q53H12\|AGK_HUMAN | AGK | 47.11 | 3.4069 |
| 7 | 7 | sp\|O43175\|SERA_HUMAN | PHGDH | 56.61 | 3.249 |
| 7 | 7 | sp\|P45880\|VDAC2_HUMAN | VDAC2 | 31.55 | 3.0615 |
| 7 | 7 | sp\|P53621\|COPA_HUMAN | COPA | 138.26 | 3.0594 |
| 7 | 7 | sp\|P48047\|ATPO_HUMAN | ATP5O | 23.26 | 2.8331 |
| 7 | 7 | sp\|P46977\|STT3A_HUMAN | STT3A | 80.48 | 2.6162 |
| 6 | 7 | sp\|P42167\|LAP2B_HUMAN | TMPO | 50.64 | 3.4633 |
| 6 | 7 | sp\|O14983\|AT2A1_HUMAN | ATP2A1 | 110.18 | 3.3261 |
| 6 | 7 | sp\|Q96T37\|RBM15_HUMAN | RBM15 | 107.12 | 2.7759 |
| 6 | 6 | sp\|O75489\|NDUS3_HUMAN | NDUFS3 | 30.22 | 3.7176 |
| 6 | 6 | sp\|Q9NXE4\|NSMA3_HUMAN | SMPD4 | 93.29 | 3.5606 |
| 6 | 6 | sp\|Q92576\|PHF3_HUMAN | PHF3 | 229.34 | 3.519 |
| 6 | 6 | sp\|Q9Y2R4\|DDX52_HUMAN | DDX52 | 67.46 | 3.4811 |
| 6 | 6 | sp\|P38432\|COIL_HUMAN | COIL | 62.57 | 3.3461 |
| 6 | 6 | sp\|Q12931\|TRAP1_HUMAN | TRAP1 | 80.06 | 3.332 |
| 6 | 6 | sp\|O75367\|H2AY_HUMAN | H2AFY | 39.59 | 3.2768 |
| 6 | 6 | sp\|Q9P2I0\|CPSF2_HUMAN | CPSF2 | 88.43 | 3.2559 |
| 6 | 6 | sp\|Q96NB2\|SFXN2_HUMAN | SFXN2 | 36.21 | 3.2502 |
| 6 | 6 | sp\|P43246\|MSH2_HUMAN | MSH2 | 104.68 | 3.2395 |
| 6 | 6 | sp\|Q92616\|GCN1_HUMAN | GCN1 | 292.57 | 3.0917 |
| 6 | 6 | sp\|O60313\|OPA1_HUMAN | OPA1 | 111.56 | 3.0052 |
| 6 | 6 | sp\|Q6JQN1\|ACD10_HUMAN | ACAD10 | 118.76 | 2.8882 |
| 5 | 6 | sp\|P35250\|RFC2_HUMAN | RFC2 | 39.13 | 4.048 |
| 5 | 6 | sp\|P53618\|COPB_HUMAN | COPB1 | 107.07 | 3.5299 |
| 5 | 6 | sp\|Q969V3\|NCLN_HUMAN | NCLN | 62.93 | 3.1625 |
| 5 | 6 | sp\|P50213\|IDH3A_HUMAN | IDH3A | 39.57 | 3.0362 |
| 5 | 6 | sp\|P49590\|SYHM_HUMAN | HARS2 | 56.85 | 3.0295 |
| 5 | 6 | sp\|P53007\|TXTP_HUMAN | SLC25A1 | 33.99 | 2.6822 |
| 5 | 6 | sp\|Q96CS3\|FAF2_HUMAN | FAF2 | 52.59 | 2.5882 |
| 4 | 6 | sp\|P50416\|CPT1A_HUMAN | CPT1A | 88.31 | 3.1041 |
| 5 | 5 | sp\|Q9HC07\|TM165_HUMAN | TMEM165 | 34.88 | 4.4695 |
| 5 | 5 | sp\|Q9NVH2\|INT7_HUMAN | INTS7 | 106.77 | 3.8125 |
| 5 | 5 | sp\|P52597\|HNRPF_HUMAN | HNRNPF | 45.64 | 3.783 |
| 5 | 5 | sp\|Q9HCM4\|E41L5_HUMAN | EPB41L5 | 81.8 | 3.7077 |
| 5 | 5 | sp\|P45954\|ACDSB_HUMAN | ACADSB | 47.46 | 3.5191 |
| 5 | 5 | sp\|P35613\|BASI_HUMAN | BSG | 42.17 | 3.5115 |
| 5 | 5 | sp\|Q9NSE4\|SYIM_HUMAN | IARS2 | 113.72 | 3.5039 |
| 5 | 5 | sp\|Q9UKM7\|MA1B1_HUMAN | MAN1B1 | 79.53 | 3.3681 |
| 5 | 5 | sp\|P33993\|MCM7_HUMAN | MCM7 | 81.26 | 3.3539 |
| 5 | 5 | sp\|Q14683\|SMC1A_HUMAN | SMC1A | 143.14 | 3.3185 |
| 5 | 5 | sp\|Q3SY69\|AL1L2_HUMAN | ALDH1L2 | 101.68 | 3.3065 |
| 5 | 5 | sp\|Q8IXI1\|MIRO2_HUMAN | RHOT2 | 68.07 | 3.2378 |
| 5 | 5 | sp\|Q08945\|SSRP1_HUMAN | SSRP1 | 81.02 | 3.2282 |
| 5 | 5 | sp\|P55786\|PSA_HUMAN | NPEPPS | 103.21 | 3.17 |
| 5 | 5 | sp\|P18074\|ERCC2_HUMAN | ERCC2 | 86.85 | 3.1631 |
| 5 | 5 | sp\|Q96EY1\|DNJA3_HUMAN | DNAJA3 | 52.46 | 3.1378 |
| 5 | 5 | sp\|Q9UH62\|ARMX3_HUMAN | ARMCX3 | 42.47 | 2.9452 |
| 5 | 5 | sp\|P39656\|OST48_HUMAN | DDOST | 50.77 | 2.9053 |
| 5 | 5 | sp\|Q8NDT2\|RB15B_HUMAN | RBM15B | 97.15 | 2.8733 |
| 5 | 5 | sp\|Q8IXI2\|MIRO1_HUMAN | RHOT1 | 70.74 | 2.8581 |
| 5 | 5 | sp\|Q9Y305\|ACOT9_HUMAN | ACOT9 | 49.87 | 2.7301 |
| 5 | 5 | sp\|Q8IZL8\|PELP1_HUMAN | PELP1 | 119.62 | 2.691 |
| 5 | 5 | sp\|P49756\|RBM25_HUMAN | RBM25 | 100.12 | 2.6029 |
| 4 | 5 | sp\|O00411\|RPOM_HUMAN | POLRMT | 138.53 | 3.9144 |
| 4 | 5 | sp\|Q92784\|DPF3_HUMAN | DPF3 | 43.06 | 3.5795 |
| 4 | 5 | sp\|P31943\|HNRH1_HUMAN | HNRNPH1 | 49.2 | 3.2832 |
| 4 | 5 | sp\|P24539\|AT5F1_HUMAN | ATP5F1 | 28.89 | 3.0786 |
| 4 | 5 | sp\|P34931\|HS71L_HUMAN | HSPA1L | 70.33 | 3.0763 |
| 4 | 5 | sp\|Q14739\|LBR_HUMAN | LBR | 70.66 | 3.0611 |
| 4 | 5 | sp\|P11177\|ODPB_HUMAN | PDHB | 39.21 | 2.8626 |
| 3 | 5 | sp\|P40938\|RFC3_HUMAN | RFC3 | 40.53 | 2.7258 |
| 4 | 4 | sp\|O75600\|KBL_HUMAN | GCAT | 45.26 | 4.4371 |
| 4 | 4 | sp\|Q9UH99\|SUN2_HUMAN | SUN2 | 80.26 | 4.1201 |
| 4 | 4 | sp\|Q5T9A4\|ATD3B_HUMAN | ATAD3B | 72.53 | 4.0914 |
| 4 | 4 | sp\|Q49A26\|GLYR1_HUMAN | GLYR1 | 60.52 | 3.9554 |
| 4 | 4 | sp\|Q9BW27\|NUP85_HUMAN | NUP85 | 74.97 | 3.9325 |
| 4 | 4 | sp\|Q8TED0\|UTP15_HUMAN | UTP15 | 58.38 | 3.9212 |
| 4 | 4 | sp\|P28331\|NDUS1_HUMAN | NDUFS1 | 79.42 | 3.8974 |
| 4 | 4 | sp\|Q3ZCQ8\|TIM50_HUMAN | TIMM50 | 39.62 | 3.8468 |
| 4 | 4 | sp\|Q9BQE9\|BCL7B_HUMAN | BCL7B | 22.18 | 3.7012 |
| 4 | 4 | sp\|O14828\|SCAM3_HUMAN | SCAMP3 | 38.26 | 3.6839 |
| 4 | 4 | sp\|P0DMV9\|HS71B_HUMAN | HSPA1B | 70.01 | 3.6515 |
| 4 | 4 | sp\|Q14684\|RRP1B_HUMAN | RRP1B | 84.38 | 3.6515 |
| 4 | 4 | sp\|P35249\|RFC4_HUMAN | RFC4 | 39.66 | 3.6418 |
| 4 | 4 | sp\|Q96SK2\|TM209_HUMAN | TMEM209 | 62.88 | 3.6406 |
| 4 | 4 | sp\|Q9NX63\|MIC19_HUMAN | CHCHD3 | 26.14 | 3.628 |
| 4 | 4 | sp\|P26368\|U2AF2_HUMAN | U2AF2 | 53.47 | 3.6016 |
| 4 | 4 | sp\|A6NJ78\|MET15_HUMAN | METTL15 | 46.09 | 3.5927 |
| 4 | 4 | sp\|O75400\|PR40A_HUMAN | PRPF40A | 108.74 | 3.5794 |
| 4 | 4 | sp\|O15269\|SPTC1_HUMAN | SPTLC1 | 52.71 | 3.5413 |
| 4 | 4 | sp\|O43615\|TIM44_HUMAN | TIMM44 | 51.32 | 3.5271 |
| 4 | 4 | sp\|Q9Y5B9\|SP16H_HUMAN | SUPT16H | 119.84 | 3.4159 |
| 4 | 4 | sp\|Q14974\|IMB1_HUMAN | KPNB1 | 97.11 | 3.3547 |
| 4 | 4 | sp\|O60762\|DPM1_HUMAN | DPM1 | 29.62 | 3.2916 |
| 4 | 4 | sp\|Q9NRK6\|ABCBA_HUMAN | ABCB10 | 79.1 | 3.2617 |
| 4 | 4 | sp\|Q01831\|XPC_HUMAN | XPC | 105.89 | 3.2417 |
| 4 | 4 | sp\|Q9BSD7\|NTPCR_HUMAN | NTPCR | 20.7 | 3.2165 |
| 4 | 4 | sp\|Q9P0J0\|NDUAD_HUMAN | NDUFA13 | 16.69 | 3.1941 |
| 4 | 4 | sp\|Q9UJZ1\|STML2_HUMAN | STOML2 | 38.51 | 3.13 |
| 4 | 4 | sp\|Q13601\|KRR1_HUMAN | KRR1 | 43.64 | 3.1253 |
| 4 | 4 | sp\|P04843\|RPN1_HUMAN | RPN1 | 68.53 | 3.0947 |
| 4 | 4 | sp\|Q9BPW8\|NIPS1_HUMAN | NIPSNAP1 | 33.29 | 3.0705 |
| 4 | 4 | sp\|Q9H9P8\|L2HDH_HUMAN | L2HGDH | 50.28 | 3.0617 |
| 4 | 4 | sp\|P17844\|DDX5_HUMAN | DDX5 | 69.1 | 3.0394 |
| 4 | 4 | sp\|O43809\|CPSF5_HUMAN | NUDT21 | 26.21 | 3.0246 |
| 4 | 4 | sp\|P26641\|EF1G_HUMAN | EEF1G | 50.09 | 3.0126 |
| 4 | 4 | sp\|Q96HW7\|INT4_HUMAN | INTS4 | 108.1 | 3.0126 |
| 4 | 4 | sp\|Q8WYP5\|ELYS_HUMAN | AHCTF1 | 252.34 | 2.9942 |
| 4 | 4 | sp\|O43837\|IDH3B_HUMAN | IDH3B | 42.16 | 2.9905 |
| 4 | 4 | sp\|Q03701\|CEBPZ_HUMAN | CEBPZ | 120.9 | 2.9709 |
| 4 | 4 | sp\|Q14966\|ZN638_HUMAN | ZNF638 | 220.49 | 2.9484 |
| 4 | 4 | sp\|P00367\|DHE3_HUMAN | GLUD1 | 61.36 | 2.9254 |
| 4 | 4 | sp\|O76031\|CLPX_HUMAN | CLPX | 69.18 | 2.9124 |
| 4 | 4 | sp\|Q9UDR5\|AASS_HUMAN | AASS | 102.07 | 2.8915 |
| 4 | 4 | sp\|Q9BVA1\|TBB2B_HUMAN | TUBB2B | 49.92 | 2.8539 |
| 4 | 4 | sp\|Q9NXF1\|TEX10_HUMAN | TEX10 | 105.61 | 2.846 |
| 4 | 4 | sp\|Q9H936\|GHC1_HUMAN | SLC25A22 | 34.45 | 2.8371 |
| 4 | 4 | sp\|P08559\|ODPA_HUMAN | PDHA1 | 43.27 | 2.8323 |
| 4 | 4 | sp\|P46821\|MAP1B_HUMAN | MAP1B | 270.47 | 2.6704 |
| 4 | 4 | sp\|Q96PK6\|RBM14_HUMAN | RBM14 | 69.45 | 2.6673 |
| 4 | 4 | sp\|Q9NR30\|DDX21_HUMAN | DDX21 | 87.29 | 2.5986 |
| 4 | 4 | sp\|Q9NRG9\|AAAS_HUMAN | AAAS | 59.54 | 2.5796 |
| 4 | 4 | sp\|A3KMH1\|VWA8_HUMAN | VWA8 | 214.69 | 2.2576 |
| 4 | 4 | sp\|Q86UT6\|NLRX1_HUMAN | NLRX1 | 107.55 | 2.2278 |
| 4 | 4 | sp\|Q9ULK5\|VANG2_HUMAN | VANGL2 | 59.68 | 2.1911 |
| 3 | 4 | sp\|P48735\|IDHP_HUMAN | IDH2 | 50.88 | 3.7507 |
| 3 | 4 | sp\|P13804\|ETFA_HUMAN | ETFA | 35.06 | 3.5786 |
| 3 | 4 | sp\|Q9H2S9\|IKZF4_HUMAN | IKZF4 | 64.07 | 3.5119 |
| 3 | 4 | sp\|Q9H7H0\|MET17_HUMAN | METTL17 | 50.7 | 3.5054 |
| 3 | 4 | sp\|Q12905\|ILF2_HUMAN | ILF2 | 43.04 | 3.3415 |
| 3 | 4 | sp\|Q96EP5\|DAZP1_HUMAN | DAZAP1 | 43.36 | 3.3015 |
| 2 | 4 | sp\|Q93079\|H2B1H_HUMAN | HIST1H2BH | 13.88 | 2.1574 |
| 3 | 3 | sp\|Q00839\|HNRPU_HUMAN | HNRNPU | 90.53 | 4.8236 |
| 3 | 3 | sp\|Q5UIP0\|RIF1_HUMAN | RIF1 | 274.29 | 4.3695 |
| 3 | 3 | sp\|Q9Y5M8\|SRPRB_HUMAN | SRPRB | 29.68 | 4.3599 |
| 3 | 3 | sp\|Q96BW9\|TAM41_HUMAN | TAMM41 | 51.03 | 4.3564 |
| 3 | 3 | sp\|Q8NI60\|COQ8A_HUMAN | COQ8A | 71.9 | 4.3561 |
| 3 | 3 | sp\|P08195\|4F2_HUMAN | SLC3A2 | 67.95 | 4.1193 |
| 3 | 3 | sp\|O94813\|SLIT2_HUMAN | SLIT2 | 169.76 | 4.0788 |
| 3 | 3 | sp\|Q9UQE7\|SMC3_HUMAN | SMC3 | 141.45 | 4.0404 |
| 3 | 3 | sp\|Q6NSZ9\|ZSC25_HUMAN | ZSCAN25 | 61.44 | 4.0337 |
| 3 | 3 | sp\|P51648\|AL3A2_HUMAN | ALDH3A2 | 54.81 | 4.0321 |
| 3 | 3 | sp\|Q6IAN0\|DRS7B_HUMAN | DHRS7B | 35.1 | 4.0295 |
| 3 | 3 | sp\|Q14498\|RBM39_HUMAN | RBM39 | 59.34 | 3.9624 |
| 3 | 3 | sp\|P23634\|AT2B4_HUMAN | ATP2B4 | 137.83 | 3.9226 |
| 3 | 3 | sp\|Q13435\|SF3B2_HUMAN | SF3B2 | 100.16 | 3.8939 |
| 3 | 3 | sp\|Q07021\|C1QBP_HUMAN | C1QBP | 31.34 | 3.806 |
| 3 | 3 | sp\|O75616\|ERAL1_HUMAN | ERAL1 | 48.32 | 3.7878 |
| 3 | 3 | sp\|A8CG34\|P121C_HUMAN | POM121C | 124.98 | 3.7762 |
| 3 | 3 | sp\|O94906\|PRP6_HUMAN | PRPF6 | 106.86 | 3.7503 |
| 3 | 3 | sp\|P53597\|SUCA_HUMAN | SUCLG1 | 36.23 | 3.721 |
| 3 | 3 | sp\|Q86Y07\|VRK2_HUMAN | VRK2 | 58.1 | 3.697 |
| 3 | 3 | sp\|Q5JTV8\|TOIP1_HUMAN | TOR1AIP1 | 66.21 | 3.6383 |
| 3 | 3 | sp\|P32189\|GLPK_HUMAN | GK | 61.21 | 3.5989 |
| 3 | 3 | sp\|P51571\|SSRD_HUMAN | SSR4 | 18.99 | 3.5681 |
| 3 | 3 | sp\|Q96D53\|COQ8B_HUMAN | COQ8B | 60.03 | 3.559 |
| 3 | 3 | sp\|P02545\|LMNA_HUMAN | LMNA | 74.09 | 3.5564 |
| 3 | 3 | tr\|F8VXC8\|F8VXC8_HUMAN | SMARCC2 | 136.1 | 3.4843 |
| 3 | 3 | tr\|Q3B7X4\|Q3B7X4_HUMAN | IMMT | 40.47 | 3.4796 |
| 3 | 3 | sp\|Q9Y679\|AUP1_HUMAN | AUP1 | 52.99 | 3.3718 |
| 3 | 3 | sp\|P13010\|XRCC5_HUMAN | XRCC5 | 82.65 | 3.3491 |
| 3 | 3 | sp\|P32322\|P5CR1_HUMAN | PYCR1 | 33.34 | 3.3089 |
| 3 | 3 | sp\|Q9UMS4\|PRP19_HUMAN | PRPF19 | 55.15 | 3.2974 |
| 3 | 3 | sp\|P12956\|XRCC6_HUMAN | XRCC6 | 69.8 | 3.2967 |
| 3 | 3 | sp\|P49755\|TMEDA_HUMAN | TMED10 | 24.96 | 3.2947 |
| 3 | 3 | sp\|Q9Y678\|COPG1_HUMAN | COPG1 | 97.66 | 3.2391 |
| 3 | 3 | sp\|P43307\|SSRA_HUMAN | SSR1 | 32.22 | 3.212 |
| 3 | 3 | sp\|O75592\|MYCB2_HUMAN | MYCBP2 | 509.76 | 3.1986 |
| 3 | 3 | sp\|Q14103\|HNRPD_HUMAN | HNRNPD | 38.41 | 3.1817 |
| 3 | 3 | sp\|Q9BX10\|GTPB2_HUMAN | GTPBP2 | 65.73 | 3.1504 |
| 3 | 3 | sp\|O95299\|NDUAA_HUMAN | NDUFA10 | 40.72 | 3.1004 |
| 3 | 3 | sp\|P49792\|RBP2_HUMAN | RANBP2 | 357.97 | 3.071 |
| 3 | 3 | sp\|P28288\|ABCD3_HUMAN | ABCD3 | 75.43 | 3.0169 |
| 3 | 3 | sp\|Q92947\|GCDH_HUMAN | GCDH | 48.1 | 3.0023 |
| 3 | 3 | sp\|Q9BW92\|SYTM_HUMAN | TARS2 | 80.99 | 2.9891 |
| 3 | 3 | sp\|O43824\|GTPB6_HUMAN | GTPBP6 | 56.85 | 2.9889 |
| 3 | 3 | sp\|Q9H583\|HEAT1_HUMAN | HEATR1 | 242.22 | 2.9281 |
| 3 | 3 | sp\|Q9H0U3\|MAGT1_HUMAN | MAGT1 | 38.01 | 2.916 |
| 3 | 3 | sp\|Q8IXB1\|DJC10_HUMAN | DNAJC10 | 91.02 | 2.9101 |
| 3 | 3 | sp\|P57088\|TMM33_HUMAN | TMEM33 | 27.96 | 2.8935 |
| 3 | 3 | sp\|P20020\|AT2B1_HUMAN | ATP2B1 | 138.67 | 2.8139 |
| 3 | 3 | sp\|Q9H857\|NT5D2_HUMAN | NT5DC2 | 60.68 | 2.811 |
| 3 | 3 | sp\|P54136\|SYRC_HUMAN | RARS | 75.33 | 2.791 |
| 3 | 3 | sp\|P40937\|RFC5_HUMAN | RFC5 | 38.47 | 2.7891 |
| 3 | 3 | sp\|Q9BTX1\|NDC1_HUMAN | NDC1 | 76.26 | 2.7416 |
| 3 | 3 | sp\|Q5T160\|SYRM_HUMAN | RARS2 | 65.46 | 2.7067 |
| 3 | 3 | sp\|Q9Y4W2\|LAS1L_HUMAN | LAS1L | 83.01 | 2.6959 |
| 3 | 3 | sp\|Q9NZ01\|TECR_HUMAN | TECR | 36.01 | 2.6888 |
| 3 | 3 | sp\|Q8WWC4\|MAIP1_HUMAN | MAIP1 | 32.52 | 2.6849 |
| 3 | 3 | sp\|Q9UL03\|INT6_HUMAN | INTS6 | 100.33 | 2.6767 |
| 3 | 3 | sp\|Q13123\|RED_HUMAN | IK | 65.56 | 2.6747 |
| 3 | 3 | sp\|O60318\|GANP_HUMAN | MCM3AP | 218.27 | 2.6195 |
| 3 | 3 | sp\|Q9HBE1\|PATZ1_HUMAN | PATZ1 | 74.01 | 2.6111 |
| 3 | 3 | sp\|O94874\|UFL1_HUMAN | UFL1 | 89.54 | 2.5668 |
| 3 | 3 | sp\|Q96HS1\|PGAM5_HUMAN | PGAM5 | 31.98 | 2.5394 |
| 3 | 3 | sp\|O43143\|DHX15_HUMAN | DHX15 | 90.88 | 2.4658 |
| 3 | 3 | sp\|P63092\|GNAS2_HUMAN | GNAS | 45.64 | 2.3729 |
| 3 | 3 | sp\|Q9HC21\|TPC_HUMAN | SLC25A19 | 35.49 | 2.0792 |
| 2 | 3 | sp\|Q01650\|LAT1_HUMAN | SLC7A5 | 54.97 | 4.3582 |
| 2 | 3 | sp\|O95674\|CDS2_HUMAN | CDS2 | 51.38 | 4.0086 |
| 2 | 3 | sp\|O75251\|NDUS7_HUMAN | NDUFS7 | 23.55 | 3.655 |
| 2 | 3 | sp\|Q9UBM7\|DHCR7_HUMAN | DHCR7 | 54.45 | 3.0868 |
| 2 | 3 | sp\|Q9Y277\|VDAC3_HUMAN | VDAC3 | 30.64 | 3.0513 |
| 2 | 3 | sp\|P04792\|HSPB1_HUMAN | HSPB1 | 22.77 | 2.9885 |
| 2 | 3 | sp\|O14925\|TIM23_HUMAN | TIMM23 | 21.93 | 2.985 |
| 2 | 3 | sp\|P14618\|KPYM_HUMAN | PKM | 57.9 | 2.9626 |
| 2 | 3 | sp\|Q9UM00\|TMCO1_HUMAN | TMCO1 | 21.16 | 2.6723 |
| 2 | 3 | sp\|Q92782\|DPF1_HUMAN | DPF1 | 42.47 | 1.8419 |
| 2 | 2 | sp\|Q9NS69\|TOM22_HUMAN | TOMM22 | 15.51 | 5.021 |
| 2 | 2 | sp\|Q99805\|TM9S2_HUMAN | TM9SF2 | 75.73 | 4.898 |
| 2 | 2 | sp\|A1L0T0\|ILVBL_HUMAN | ILVBL | 67.82 | 4.8795 |
| 2 | 2 | sp\|Q9BSF4\|TIM29_HUMAN | TIMM29 | 29.22 | 4.7691 |
| 2 | 2 | sp\|Q9NNW5\|WDR6_HUMAN | WDR6 | 121.65 | 4.6122 |
| 2 | 2 | sp\|Q70CQ3\|UBP30_HUMAN | USP30 | 58.47 | 4.5749 |
| 2 | 2 | sp\|Q9GZR7\|DDX24_HUMAN | DDX24 | 96.27 | 4.5606 |
| 2 | 2 | sp\|P09622\|DLDH_HUMAN | DLD | 54.14 | 4.506 |
| 2 | 2 | sp\|P00403\|COX2_HUMAN | MT-CO2 | 25.55 | 4.3826 |
| 2 | 2 | sp\|Q8TB37\|NUBPL_HUMAN | NUBPL | 34.06 | 4.2762 |
| 2 | 2 | sp\|Q5JPH6\|SYEM_HUMAN | EARS2 | 58.65 | 4.2723 |
| 2 | 2 | sp\|P07910\|HNRPC_HUMAN | HNRNPC | 33.65 | 4.2686 |
| 2 | 2 | sp\|P47985\|UCRI_HUMAN | UQCRFS1 | 29.65 | 4.2492 |
| 2 | 2 | sp\|Q9NPI1\|BRD7_HUMAN | BRD7 | 74.09 | 4.2027 |
| 2 | 2 | sp\|P41208\|CETN2_HUMAN | CETN2 | 19.73 | 4.1872 |
| 2 | 2 | sp\|O00165\|HAX1_HUMAN | HAX1 | 31.6 | 4.1829 |
| 2 | 2 | sp\|P55265\|DSRAD_HUMAN | ADAR | 135.98 | 4.1552 |
| 2 | 2 | sp\|Q9NUQ2\|PLCE_HUMAN | AGPAT5 | 42.04 | 4.1535 |
| 2 | 2 | sp\|Q68CQ7\|GL8D1_HUMAN | GLT8D1 | 41.91 | 4.0458 |
| 2 | 2 | sp\|Q5HYI7\|MTX3_HUMAN | MTX3 | 35.07 | 4.0096 |
| 2 | 2 | sp\|P07437\|TBB5_HUMAN | TUBB | 49.64 | 3.9765 |
| 2 | 2 | sp\|P13674\|P4HA1_HUMAN | P4HA1 | 61.01 | 3.9399 |
| 2 | 2 | sp\|Q8WY36\|BBX_HUMAN | BBX | 105.06 | 3.912 |
| 2 | 2 | sp\|Q6DD88\|ATLA3_HUMAN | ATL3 | 60.5 | 3.8159 |
| 2 | 2 | sp\|O00116\|ADAS_HUMAN | AGPS | 72.87 | 3.8089 |
| 2 | 2 | sp\|P03886\|NU1M_HUMAN | MT-ND1 | 35.64 | 3.785 |
| 2 | 2 | sp\|O15270\|SPTC2_HUMAN | SPTLC2 | 62.88 | 3.7695 |
| 2 | 2 | sp\|Q9UDX5\|MTFP1_HUMAN | MTFP1 | 18 | 3.7587 |
| 2 | 2 | sp\|P52292\|IMA1_HUMAN | KPNA2 | 57.83 | 3.7421 |
| 2 | 2 | sp\|O95639\|CPSF4_HUMAN | CPSF4 | 30.23 | 3.7332 |
| 2 | 2 | sp\|Q96C36\|P5CR2_HUMAN | PYCR2 | 33.62 | 3.6947 |
| 2 | 2 | sp\|P11498\|PYC_HUMAN | PC | 129.55 | 3.6878 |
| 2 | 2 | sp\|O00410\|IP05_HUMAN | IPO5 | 123.55 | 3.6863 |
| 2 | 2 | sp\|O14654\|IRS4_HUMAN | IRS4 | 133.68 | 3.685 |
| 2 | 2 | sp\|Q9NVH1\|DJC11_HUMAN | DNAJC11 | 63.24 | 3.6387 |
| 2 | 2 | sp\|Q86VP6\|CAND1_HUMAN | CAND1 | 136.29 | 3.6258 |
| 2 | 2 | sp\|P05412\|JUN_HUMAN | JUN | 35.65 | 3.6102 |
| 2 | 2 | sp\|Q00587\|BORG5_HUMAN | CDC42EP1 | 40.27 | 3.6034 |
| 2 | 2 | sp\|P62987\|RL40_HUMAN | UBA52 | 14.72 | 3.5869 |
| 2 | 2 | sp\|P12004\|PCNA_HUMAN | PCNA | 28.75 | 3.5839 |
| 2 | 2 | sp\|Q9NRZ9\|HELLS_HUMAN | HELLS | 97.01 | 3.5446 |
| 2 | 2 | sp\|Q15393\|SF3B3_HUMAN | SF3B3 | 135.49 | 3.5349 |
| 2 | 2 | sp\|Q9NVI1\|FANCI_HUMAN | FANCI | 149.23 | 3.532 |
| 2 | 2 | sp\|P33527\|MRP1_HUMAN | ABCC1 | 171.48 | 3.5224 |
| 2 | 2 | sp\|Q03252\|LMNB2_HUMAN | LMNB2 | 69.91 | 3.5134 |
| 2 | 2 | sp\|O00400\|ACATN_HUMAN | SLC33A1 | 60.87 | 3.5111 |
| 2 | 2 | sp\|Q92522\|H1X_HUMAN | H1FX | 22.47 | 3.4867 |
| 2 | 2 | sp\|Q9UBU9\|NXF1_HUMAN | NXF1 | 70.14 | 3.471 |
| 2 | 2 | sp\|Q15365\|PCBP1_HUMAN | PCBP1 | 37.47 | 3.4358 |
| 2 | 2 | sp\|Q9H061\|T126A_HUMAN | TMEM126A | 21.51 | 3.4112 |
| 2 | 2 | sp\|P52429\|DGKE_HUMAN | DGKE | 63.88 | 3.3745 |
| 2 | 2 | sp\|O00257\|CBX4_HUMAN | CBX4 | 61.33 | 3.344 |
| 2 | 2 | sp\|P54886\|P5CS_HUMAN | ALDH18A1 | 87.25 | 3.3363 |
| 2 | 2 | sp\|O43491\|E41L2_HUMAN | EPB41L2 | 112.52 | 3.3288 |
| 2 | 2 | sp\|Q5JTZ9\|SYAM_HUMAN | AARS2 | 107.27 | 3.3224 |
| 2 | 2 | sp\|P08574\|CY1_HUMAN | CYC1 | 35.4 | 3.3097 |
| 2 | 2 | sp\|P48651\|PTSS1_HUMAN | PTDSS1 | 55.49 | 3.2672 |
| 2 | 2 | sp\|Q53R41\|FAKD1_HUMAN | FASTKD1 | 97.35 | 3.263 |
| 2 | 2 | sp\|Q92542\|NICA_HUMAN | NCSTN | 78.36 | 3.2618 |
| 2 | 2 | sp\|Q8IY17\|PLPL6_HUMAN | PNPLA6 | 149.9 | 3.2524 |
| 2 | 2 | sp\|P30825\|CTR1_HUMAN | SLC7A1 | 67.59 | 3.2044 |
| 2 | 2 | sp\|O15321\|TM9S1_HUMAN | TM9SF1 | 68.82 | 3.1856 |
| 2 | 2 | sp\|P31689\|DNJA1_HUMAN | DNAJA1 | 44.84 | 3.1792 |
| 2 | 2 | sp\|Q5JVF3\|PCID2_HUMAN | PCID2 | 46 | 3.1732 |
| 2 | 2 | sp\|Q8WUK0\|PTPM1_HUMAN | PTPMT1 | 22.83 | 3.1618 |
| 2 | 2 | sp\|O75396\|SC22B_HUMAN | SEC22B | 24.58 | 3.154 |
| 2 | 2 | sp\|Q9Y2J2\|E41L3_HUMAN | EPB41L3 | 120.6 | 3.1507 |
| 2 | 2 | sp\|O95573\|ACSL3_HUMAN | ACSL3 | 80.37 | 3.1429 |
| 2 | 2 | sp\|Q96N66\|MBOA7_HUMAN | MBOAT7 | 52.73 | 3.0857 |
| 2 | 2 | sp\|Q9UG63\|ABCF2_HUMAN | ABCF2 | 71.24 | 3.0777 |
| 2 | 2 | sp\|Q10469\|MGAT2_HUMAN | MGAT2 | 51.52 | 3.06 |
| 2 | 2 | sp\|Q68CP9\|ARID2_HUMAN | ARID2 | 197.27 | 3.0415 |
| 2 | 2 | sp\|Q8NC56\|LEMD2_HUMAN | LEMD2 | 56.94 | 3.0367 |
| 2 | 2 | sp\|Q9UBD5\|ORC3_HUMAN | ORC3 | 82.2 | 3.0212 |
| 2 | 2 | sp\|O00159\|MYO1C_HUMAN | MYO1C | 121.61 | 3.0205 |
| 2 | 2 | sp\|P56134\|ATPK_HUMAN | ATP5J2 | 10.91 | 3.0031 |
| 2 | 2 | sp\|P38117\|ETFB_HUMAN | ETFB | 27.83 | 3.001 |
| 2 | 2 | sp\|P12235\|ADT1_HUMAN | SLC25A4 | 33.04 | 2.929 |
| 2 | 2 | sp\|Q5C9Z4\|NOM1_HUMAN | NOM1 | 96.2 | 2.8956 |
| 2 | 2 | sp\|Q8TCT9\|HM13_HUMAN | HM13 | 41.46 | 2.8954 |
| 2 | 2 | sp\|Q9H2D1\|MFTC_HUMAN | SLC25A32 | 35.38 | 2.892 |
| 2 | 2 | sp\|P17987\|TCPA_HUMAN | TCP1 | 60.31 | 2.8893 |
| 2 | 2 | sp\|Q9BYN8\|RT26_HUMAN | MRPS26 | 24.2 | 2.8798 |
| 2 | 2 | sp\|Q13428\|TCOF_HUMAN | TCOF1 | 152.02 | 2.8687 |
| 2 | 2 | sp\|Q8N442\|GUF1_HUMAN | GUF1 | 74.28 | 2.8578 |
| 2 | 2 | sp\|Q9NSI2\|F207A_HUMAN | FAM207A | 25.44 | 2.8529 |
| 2 | 2 | sp\|O75323\|NIPS2_HUMAN | NIPSNAP2 | 33.72 | 2.8489 |
| 2 | 2 | sp\|Q8NF37\|PCAT1_HUMAN | LPCAT1 | 59.11 | 2.8362 |
| 2 | 2 | sp\|P46087\|NOP2_HUMAN | NOP2 | 89.25 | 2.83 |
| 2 | 2 | sp\|Q15120\|PDK3_HUMAN | PDK3 | 46.91 | 2.8249 |
| 2 | 2 | sp\|Q9UGN5\|PARP2_HUMAN | PARP2 | 66.16 | 2.8221 |
| 2 | 2 | sp\|Q12788\|TBL3_HUMAN | TBL3 | 88.98 | 2.8072 |
| 2 | 2 | sp\|Q13505\|MTX1_HUMAN | MTX1 | 51.44 | 2.802 |
| 2 | 2 | sp\|Q9H0A0\|NAT10_HUMAN | NAT10 | 115.66 | 2.785 |
| 2 | 2 | sp\|Q5VV42\|CDKAL_HUMAN | CDKAL1 | 65.07 | 2.7816 |
| 2 | 2 | sp\|Q9H223\|EHD4_HUMAN | EHD4 | 61.14 | 2.7606 |
| 2 | 2 | sp\|P38435\|VKGC_HUMAN | GGCX | 87.5 | 2.7259 |
| 2 | 2 | sp\|Q99459\|CDC5L_HUMAN | CDC5L | 92.19 | 2.7222 |
| 2 | 2 | sp\|Q99653\|CHP1_HUMAN | CHP1 | 22.44 | 2.7104 |
| 2 | 2 | sp\|Q9HD45\|TM9S3_HUMAN | TM9SF3 | 67.84 | 2.6916 |
| 2 | 2 | sp\|Q9Y4A5\|TRRAP_HUMAN | TRRAP | 437.32 | 2.6864 |
| 2 | 2 | sp\|Q9Y6J9\|TAF6L_HUMAN | TAF6L | 67.77 | 2.6785 |
| 2 | 2 | sp\|O95347\|SMC2_HUMAN | SMC2 | 135.57 | 2.6624 |
| 2 | 2 | sp\|Q92544\|TM9S4_HUMAN | TM9SF4 | 74.47 | 2.6428 |
| 2 | 2 | sp\|P11387\|TOP1_HUMAN | TOP1 | 90.67 | 2.6258 |
| 2 | 2 | sp\|Q9P032\|NDUF4_HUMAN | NDUFAF4 | 20.25 | 2.619 |
| 2 | 2 | sp\|Q12906\|ILF3_HUMAN | ILF3 | 95.28 | 2.6162 |
| 2 | 2 | sp\|Q9BXW7\|HDHD5_HUMAN | HDHD5 | 46.29 | 2.6115 |
| 2 | 2 | sp\|P49821\|NDUV1_HUMAN | NDUFV1 | 50.78 | 2.5884 |
| 2 | 2 | sp\|O00192\|ARVC_HUMAN | ARVCF | 104.58 | 2.521 |
| 2 | 2 | sp\|Q9BVK6\|TMED9_HUMAN | TMED9 | 27.26 | 2.5109 |
| 2 | 2 | sp\|Q6ZXV5\|TMTC3_HUMAN | TMTC3 | 103.94 | 2.5017 |
| 2 | 2 | sp\|O76062\|ERG24_HUMAN | TM7SF2 | 46.38 | 2.4483 |
| 2 | 2 | sp\|Q9Y512\|SAM50_HUMAN | SAMM50 | 51.94 | 2.4034 |
| 2 | 2 | sp\|Q5TA45\|INT11_HUMAN | INTS11 | 67.62 | 2.4003 |
| 2 | 2 | sp\|P28370\|SMCA1_HUMAN | SMARCA1 | 122.53 | 2.3685 |
| 2 | 2 | sp\|P17480\|UBF1_HUMAN | UBTF | 89.35 | 2.3649 |
| 2 | 2 | sp\|P84103\|SRSF3_HUMAN | SRSF3 | 19.32 | 2.2759 |
| 2 | 2 | sp\|Q14527\|HLTF_HUMAN | HLTF | 113.86 | 2.2533 |
| 2 | 2 | sp\|P61619\|S61A1_HUMAN | SEC61A1 | 52.23 | 2.2427 |
| 2 | 2 | sp\|Q9Y2R9\|RT07_HUMAN | MRPS7 | 28.12 | 2.1584 |
| 2 | 2 | sp\|Q9BSJ2\|GCP2_HUMAN | TUBGCP2 | 102.47 | 1.8316 |
| 1 | 2 | sp\|Q01130\|SRSF2_HUMAN | SRSF2 | 25.46 | 4.3513 |
| 1 | 2 | sp\|P16104\|H2AX_HUMAN | H2AFX | 15.14 | 3.4679 |
| 1 | 2 | sp\|O94805\|ACL6B_HUMAN | ACTL6B | 46.85 | 3.0937 |
| 1 | 2 | sp\|Q99959\|PKP2_HUMAN | PKP2 | 97.35 | 3.0573 |
| 1 | 2 | sp\|Q9BYX7\|ACTBM_HUMAN | POTEKP | 41.99 | 3.0304 |
| 1 | 2 | sp\|Q9Y3E0\|GOT1B_HUMAN | GOLT1B | 15.42 | 2.5183 |
| 1 | 2 | sp\|Q9Y2X0\|MED16_HUMAN | MED16 | 96.73 | 2.3369 |
| 1 | 2 | sp\|Q9P104\|DOK5_HUMAN | DOK5 | 35.44 | 2.0759 |
| 1 | 1 | sp\|Q9NPL8\|TIDC1_HUMAN | TIMMDC1 | 32.16 | 5.5872 |
| 1 | 1 | sp\|Q75QN2\|INT8_HUMAN | INTS8 | 113.02 | 5.1795 |
| 1 | 1 | sp\|Q7L8L6\|FAKD5_HUMAN | FASTKD5 | 86.52 | 5.1458 |
| 1 | 1 | sp\|Q15287\|RNPS1_HUMAN | RNPS1 | 34.19 | 4.9637 |
| 1 | 1 | sp\|Q8WUA4\|TF3C2_HUMAN | GTF3C2 | 100.62 | 4.8457 |
| 1 | 1 | sp\|Q9Y2Q3\|GSTK1_HUMAN | GSTK1 | 25.48 | 4.8083 |
| 1 | 1 | sp\|Q9H845\|ACAD9_HUMAN | ACAD9 | 68.72 | 4.7486 |
| 1 | 1 | sp\|P61978\|HNRPK_HUMAN | HNRNPK | 50.94 | 4.7158 |
| 1 | 1 | sp\|O94766\|B3GA3_HUMAN | B3GAT3 | 37.1 | 4.7011 |
| 1 | 1 | sp\|O15554\|KCNN4_HUMAN | KCNN4 | 47.66 | 4.684 |
| 1 | 1 | sp\|O60884\|DNJA2_HUMAN | DNAJA2 | 45.72 | 4.6496 |
| 1 | 1 | sp\|P62995\|TRA2B_HUMAN | TRA2B | 33.65 | 4.633 |
| 1 | 1 | sp\|Q8N6R0\|MET13_HUMAN | METTL13 | 78.72 | 4.5641 |
| 1 | 1 | tr\|B7ZAF6\|B7ZAF6_HUMAN | SUCLA2 | 43.83 | 4.5502 |
| 1 | 1 | sp\|Q04837\|SSBP_HUMAN | SSBP1 | 17.25 | 4.5487 |
| 1 | 1 | sp\|Q6B0I6\|KDM4D_HUMAN | KDM4D | 58.57 | 4.5398 |
| 1 | 1 | sp\|P56962\|STX17_HUMAN | STX17 | 33.38 | 4.5351 |
| 1 | 1 | sp\|Q9Y3D7\|TIM16_HUMAN | PAM16 | 13.82 | 4.4422 |
| 1 | 1 | sp\|P08708\|RS17_HUMAN | RPS17 | 15.54 | 4.4124 |
| 1 | 1 | sp\|Q9BT22\|ALG1_HUMAN | ALG1 | 52.48 | 4.402 |
| 1 | 1 | tr\|Q2M1J6\|Q2M1J6_HUMAN | OXA1L | 55.35 | 4.3966 |
| 1 | 1 | sp\|O75528\|TADA3_HUMAN | TADA3 | 48.87 | 4.3954 |
| 1 | 1 | sp\|Q9UNQ2\|DIM1_HUMAN | DIMT1 | 35.21 | 4.3536 |
| 1 | 1 | sp\|O95470\|SGPL1_HUMAN | SGPL1 | 63.48 | 4.3015 |
| 1 | 1 | sp\|Q86Y91\|KI18B_HUMAN | KIF18B | 94.16 | 4.2375 |
| 1 | 1 | sp\|Q9NWW5\|CLN6_HUMAN | CLN6 | 35.9 | 4.2186 |
| 1 | 1 | sp\|Q969Y2\|GTPB3_HUMAN | GTPBP3 | 52.03 | 4.1992 |
| 1 | 1 | sp\|O43159\|RRP8_HUMAN | RRP8 | 50.68 | 4.1825 |
| 1 | 1 | sp\|Q8N6L1\|KTAP2_HUMAN | KRTCAP2 | 14.67 | 4.1782 |
| 1 | 1 | sp\|O75531\|BAF_HUMAN | BANF1 | 10.05 | 4.1148 |
| 1 | 1 | sp\|O94887\|FARP2_HUMAN | FARP2 | 119.81 | 4.1008 |
| 1 | 1 | sp\|Q96GC9\|VMP1_HUMAN | VMP1 | 46.21 | 4.0888 |
| 1 | 1 | sp\|Q9BPX6\|MICU1_HUMAN | MICU1 | 54.32 | 4.0864 |
| 1 | 1 | sp\|O43347\|MSI1H_HUMAN | MSI1 | 39.1 | 4.0779 |
| 1 | 1 | tr\|B4DR34\|B4DR34_HUMAN | | 36.86 | 4.074 |
| 1 | 1 | sp\|Q8TAE8\|G45IP_HUMAN | GADD45GIP1 | 25.37 | 4.0691 |
| 1 | 1 | sp\|Q8N465\|D2HDH_HUMAN | D2HGDH | 56.38 | 4.0528 |
| 1 | 1 | sp\|O95140\|MFN2_HUMAN | MFN2 | 86.35 | 4.0323 |
| 1 | 1 | sp\|P00387\|NB5R3_HUMAN | CYB5R3 | 34.21 | 4.0153 |
| 1 | 1 | sp\|Q15334\|L2GL1_HUMAN | LLGL1 | 115.35 | 4.0019 |
| 1 | 1 | sp\|Q9UHX1\|PUF60_HUMAN | PUF60 | 59.84 | 3.985 |
| 1 | 1 | sp\|Q96DA6\|TIM14_HUMAN | DNAJC19 | 12.49 | 3.9537 |
| 1 | 1 | sp\|O43390\|HNRPR_HUMAN | HNRNPR | 70.9 | 3.9371 |
| 1 | 1 | sp\|P62820\|RAB1A_HUMAN | RAB1A | 22.66 | 3.9346 |
| 1 | 1 | sp\|Q9HDC5\|JPH1_HUMAN | JPH1 | 71.64 | 3.9134 |
| 1 | 1 | sp\|Q8TBP6\|S2540_HUMAN | SLC25A40 | 38.1 | 3.8986 |
| 1 | 1 | sp\|O75352\|MPU1_HUMAN | MPDU1 | 26.62 | 3.8941 |
| 1 | 1 | sp\|O75533\|SF3B1_HUMAN | SF3B1 | 145.74 | 3.8767 |
| 1 | 1 | sp\|P35558\|PCKGC_HUMAN | PCK1 | 69.15 | 3.8646 |
| 1 | 1 | sp\|Q15459\|SF3A1_HUMAN | SF3A1 | 88.83 | 3.8594 |
| 1 | 1 | sp\|O14880\|MGST3_HUMAN | MGST3 | 16.51 | 3.8593 |
| 1 | 1 | sp\|Q6NTF9\|RHBD2_HUMAN | RHBDD2 | 39.18 | 3.819 |
| 1 | 1 | sp\|Q15233\|NONO_HUMAN | NONO | 54.2 | 3.7878 |
| 1 | 1 | sp\|Q9H4L4\|SENP3_HUMAN | SENP3 | 64.97 | 3.785 |
| 1 | 1 | sp\|Q96QD8\|S38A2_HUMAN | SLC38A2 | 55.99 | 3.7721 |
| 1 | 1 | sp\|Q9H8H3\|MET7A_HUMAN | METTL7A | 28.3 | 3.7715 |
| 1 | 1 | sp\|Q9NVH0\|EXD2_HUMAN | EXD2 | 70.31 | 3.7582 |
| 1 | 1 | sp\|Q9H5Q4\|TFB2M_HUMAN | TFB2M | 45.32 | 3.7433 |
| 1 | 1 | sp\|Q8IWA4\|MFN1_HUMAN | MFN1 | 84.05 | 3.742 |
| 1 | 1 | tr\|J3KN66\|J3KN66_HUMAN | TOR1AIP1 | 67.78 | 3.734 |
| 1 | 1 | sp\|O00148\|DX39A_HUMAN | DDX39A | 49.1 | 3.7271 |
| 1 | 1 | sp\|O75976\|CBPD_HUMAN | CPD | 152.84 | 3.726 |
| 1 | 1 | sp\|Q3SXY8\|AR13B_HUMAN | ARL13B | 48.61 | 3.7066 |
| 1 | 1 | sp\|P35232\|PHB_HUMAN | PHB | 29.79 | 3.701 |
| 1 | 1 | sp\|Q5SY16\|NOL9_HUMAN | NOL9 | 79.27 | 3.6809 |
| 1 | 1 | sp\|Q9Y3A6\|TMED5_HUMAN | TMED5 | 25.99 | 3.655 |
| 1 | 1 | sp\|Q9BZE1\|RM37_HUMAN | MRPL37 | 48.09 | 3.6351 |
| 1 | 1 | sp\|Q8NBN7\|RDH13_HUMAN | RDH13 | 35.91 | 3.6132 |
| 1 | 1 | sp\|Q6NUN9\|ZN746_HUMAN | ZNF746 | 69.09 | 3.6064 |
| 1 | 1 | sp\|P41252\|SYIC_HUMAN | IARS | 144.41 | 3.601 |
| 1 | 1 | sp\|Q96BN2\|TADA1_HUMAN | TADA1 | 37.36 | 3.5969 |
| 1 | 1 | sp\|P54652\|HSP72_HUMAN | HSPA2 | 69.98 | 3.5946 |
| 1 | 1 | sp\|Q02338\|BDH_HUMAN | BDH1 | 38.13 | 3.5915 |
| 1 | 1 | tr\|A0A1B0GTJ8\|A0A1B0GTJ8_HUMAN | ARID1B | 163.28 | 3.5712 |
| 1 | 1 | sp\|Q9Y5Y0\|FLVC1_HUMAN | FLVCR1 | 59.82 | 3.5588 |
| 1 | 1 | sp\|Q9H0H0\|INT2_HUMAN | INTS2 | 134.24 | 3.534 |
| 1 | 1 | tr\|H7BXI1\|H7BXI1_HUMAN | ESYT2 | 97.95 | 3.5218 |
| 1 | 1 | sp\|O00571\|DDX3X_HUMAN | DDX3X | 73.2 | 3.5084 |
| 1 | 1 | sp\|Q6P9B9\|INT5_HUMAN | INTS5 | 107.93 | 3.4997 |
| 1 | 1 | sp\|Q969X6\|UTP4_HUMAN | UTP4 | 76.84 | 3.4982 |
| 1 | 1 | sp\|Q7Z5K2\|WAPL_HUMAN | WAPL | 132.86 | 3.4906 |
| 1 | 1 | sp\|Q8NI27\|THOC2_HUMAN | THOC2 | 182.66 | 3.4868 |
| 1 | 1 | sp\|Q6YN16\|HSDL2_HUMAN | HSDL2 | 45.37 | 3.4781 |
| 1 | 1 | sp\|P83731\|RL24_HUMAN | RPL24 | 17.77 | 3.4775 |
| 1 | 1 | sp\|Q5BKZ1\|ZN326_HUMAN | ZNF326 | 65.61 | 3.4679 |
| 1 | 1 | IGKC_MOUSE | | 11.77 | 3.4619 |
| 1 | 1 | sp\|Q5T0B9\|ZN362_HUMAN | ZNF362 | 45.79 | 3.4575 |
| 1 | 1 | sp\|Q16698\|DECR_HUMAN | DECR1 | 36.04 | 3.4391 |
| 1 | 1 | sp\|Q6PIW4\|FIGL1_HUMAN | FIGNL1 | 74.03 | 3.4381 |
| 1 | 1 | sp\|Q14517\|FAT1_HUMAN | FAT1 | 505.96 | 3.4316 |
| 1 | 1 | sp\|Q8TAA9\|VANG1_HUMAN | VANGL1 | 59.94 | 3.4174 |
| 1 | 1 | sp\|Q8NBI6\|XXLT1_HUMAN | XXYLT1 | 43.78 | 3.3993 |
| 1 | 1 | sp\|P61225\|RAP2B_HUMAN | RAP2B | 20.49 | 3.3924 |
| 1 | 1 | sp\|Q9P2E9\|RRBP1_HUMAN | RRBP1 | 152.38 | 3.3909 |
| 1 | 1 | sp\|O14776\|TCRG1_HUMAN | TCERG1 | 123.82 | 3.3829 |
| 1 | 1 | sp\|P08670\|VIME_HUMAN | VIM | 53.62 | 3.3766 |
| 1 | 1 | sp\|P68363\|TBA1B_HUMAN | TUBA1B | 50.12 | 3.3736 |
| 1 | 1 | sp\|P62316\|SMD2_HUMAN | SNRPD2 | 13.52 | 3.3706 |
| 1 | 1 | sp\|Q8WY07\|CTR3_HUMAN | SLC7A3 | 67.13 | 3.3446 |
| 1 | 1 | sp\|O95070\|YIF1A_HUMAN | YIF1A | 31.99 | 3.3423 |
| 1 | 1 | sp\|Q9Y289\|SC5A6_HUMAN | SLC5A6 | 68.6 | 3.3106 |
| 1 | 1 | sp\|P62701\|RS4X_HUMAN | RPS4X | 29.58 | 3.3014 |
| 1 | 1 | sp\|Q9BVJ6\|UT14A_HUMAN | UTP14A | 87.92 | 3.2855 |
| 1 | 1 | sp\|Q9Y3T9\|NOC2L_HUMAN | NOC2L | 84.87 | 3.2781 |
| 1 | 1 | sp\|P05067\|A4_HUMAN | APP | 86.89 | 3.2681 |
| 1 | 1 | sp\|P98194\|AT2C1_HUMAN | ATP2C1 | 100.51 | 3.2635 |
| 1 | 1 | sp\|Q06587\|RING1_HUMAN | RING1 | 42.4 | 3.2538 |
| 1 | 1 | sp\|Q13148\|TADBP_HUMAN | TARDBP | 44.71 | 3.2457 |
| 1 | 1 | tr\|Q59G16\|Q59G16_HUMAN | | 127.3 | 3.2436 |
| 1 | 1 | sp\|Q9UKU7\|ACAD8_HUMAN | ACAD8 | 45.04 | 3.2308 |
| 1 | 1 | sp\|P06493\|CDK1_HUMAN | CDK1 | 34.07 | 3.2145 |
| 1 | 1 | sp\|Q86VI3\|IQGA3_HUMAN | IQGAP3 | 184.58 | 3.2033 |
| 1 | 1 | sp\|Q71UI9\|H2AV_HUMAN | H2AFV | 13.5 | 3.2018 |
| 1 | 1 | sp\|Q9Y584\|TIM22_HUMAN | TIMM22 | 20.02 | 3.1815 |
| 1 | 1 | sp\|Q96AA3\|RFT1_HUMAN | RFT1 | 60.3 | 3.1606 |
| 1 | 1 | sp\|O60830\|TI17B_HUMAN | TIMM17B | 18.26 | 3.1592 |
| 1 | 1 | sp\|Q8TEM1\|PO210_HUMAN | NUP210 | 204.98 | 3.1521 |
| 1 | 1 | sp\|P62241\|RS8_HUMAN | RPS8 | 24.19 | 3.1446 |
| 1 | 1 | sp\|P04406\|G3P_HUMAN | GAPDH | 36.03 | 3.1344 |
| 1 | 1 | sp\|Q96DA2\|RB39B_HUMAN | RAB39B | 24.61 | 3.1279 |
| 1 | 1 | sp\|Q9ULH0\|KDIS_HUMAN | KIDINS220 | 196.42 | 3.1272 |
| 1 | 1 | sp\|O60264\|SMCA5_HUMAN | SMARCA5 | 121.83 | 3.1176 |
| 1 | 1 | sp\|Q15572\|TAF1C_HUMAN | TAF1C | 95.15 | 3.1073 |
| 1 | 1 | sp\|Q9Y6M5\|ZNT1_HUMAN | SLC30A1 | 55.26 | 3.1001 |
| 1 | 1 | sp\|P19404\|NDUV2_HUMAN | NDUFV2 | 27.37 | 3.0934 |
| 1 | 1 | sp\|Q9Y2W1\|TR150_HUMAN | THRAP3 | 108.6 | 3.092 |
| 1 | 1 | sp\|Q9H0U9\|TSYL1_HUMAN | TSPYL1 | 49.16 | 3.0855 |
| 1 | 1 | sp\|Q9Y256\|FACE2_HUMAN | RCE1 | 35.81 | 3.0848 |
| 1 | 1 | sp\|O43913\|ORC5_HUMAN | ORC5 | 50.25 | 3.0745 |
| 1 | 1 | sp\|O00483\|NDUA4_HUMAN | NDUFA4 | 9.36 | 3.0468 |
| 1 | 1 | sp\|Q15366\|PCBP2_HUMAN | PCBP2 | 38.56 | 3.0445 |
| 1 | 1 | sp\|P35659\|DEK_HUMAN | DEK | 42.65 | 3.0425 |
| 1 | 1 | sp\|P24468\|COT2_HUMAN | NR2F2 | 45.54 | 3.0302 |
| 1 | 1 | sp\|Q16563\|SYPL1_HUMAN | SYPL1 | 28.55 | 3.0247 |
| 1 | 1 | sp\|Q9H300\|PARL_HUMAN | PARL | 42.16 | 3.0049 |
| 1 | 1 | sp\|P05091\|ALDH2_HUMAN | ALDH2 | 56.35 | 2.975 |
| 1 | 1 | sp\|Q13415\|ORC1_HUMAN | ORC1 | 97.29 | 2.9662 |
| 1 | 1 | sp\|Q9Y5A9\|YTHD2_HUMAN | YTHDF2 | 62.3 | 2.954 |
| 1 | 1 | sp\|P68871\|HBB_HUMAN | HBB | 15.99 | 2.9512 |
| 1 | 1 | sp\|O14656\|TOR1A_HUMAN | TOR1A | 37.78 | 2.9413 |
| 1 | 1 | sp\|Q9UJ14\|GGT7_HUMAN | GGT7 | 70.42 | 2.9379 |
| 1 | 1 | sp\|O95168\|NDUB4_HUMAN | NDUFB4 | 15.2 | 2.9313 |
| 1 | 1 | sp\|Q15392\|DHC24_HUMAN | DHCR24 | 60.06 | 2.9241 |
| 1 | 1 | sp\|Q9ULK4\|MED23_HUMAN | MED23 | 156.37 | 2.9228 |
| 1 | 1 | sp\|Q09161\|NCBP1_HUMAN | NCBP1 | 91.78 | 2.9153 |
| 1 | 1 | sp\|Q9Y3Z3\|SAMH1_HUMAN | SAMHD1 | 72.15 | 2.9067 |
| 1 | 1 | tr\|B3KUE6\|B3KUE6_HUMAN | | 30.19 | 2.8998 |
| 1 | 1 | sp\|Q92643\|GPI8_HUMAN | PIGK | 45.22 | 2.8928 |
| 1 | 1 | sp\|Q9BUN8\|DERL1_HUMAN | DERL1 | 28.78 | 2.8902 |
| 1 | 1 | sp\|Q9BQ39\|DDX50_HUMAN | DDX50 | 82.51 | 2.889 |
| 1 | 1 | sp\|Q9HAV4\|XPO5_HUMAN | XPO5 | 136.22 | 2.8793 |
| 1 | 1 | sp\|O75964\|ATP5L_HUMAN | ATP5L | 11.42 | 2.8756 |
| 1 | 1 | sp\|Q9NTJ3\|SMC4_HUMAN | SMC4 | 147.09 | 2.8579 |
| 1 | 1 | sp\|Q14008\|CKAP5_HUMAN | CKAP5 | 225.35 | 2.8551 |
| 1 | 1 | sp\|Q8NCH0\|CHSTE_HUMAN | CHST14 | 42.97 | 2.8501 |
| 1 | 1 | sp\|Q92604\|LGAT1_HUMAN | LPGAT1 | 43.06 | 2.8286 |
| 1 | 1 | sp\|P50454\|SERPH_HUMAN | SERPINH1 | 46.41 | 2.8283 |
| 1 | 1 | sp\|P56192\|SYMC_HUMAN | MARS | 101.05 | 2.8127 |
| 1 | 1 | sp\|Q5JU69\|TOR2A_HUMAN | TOR2A | 35.69 | 2.8096 |
| 1 | 1 | sp\|Q9Y232\|CDYL1_HUMAN | CDYL | 66.44 | 2.7991 |
| 1 | 1 | sp\|P50897\|PPT1_HUMAN | PPT1 | 34.17 | 2.7912 |
| 1 | 1 | sp\|Q9NZ08\|ERAP1_HUMAN | ERAP1 | 107.17 | 2.7866 |
| 1 | 1 | sp\|Q9NQ50\|RM40_HUMAN | MRPL40 | 24.48 | 2.7723 |
| 1 | 1 | sp\|Q96GQ7\|DDX27_HUMAN | DDX27 | 89.78 | 2.766 |
| 1 | 1 | sp\|O14735\|CDIPT_HUMAN | CDIPT | 23.52 | 2.7651 |
| 1 | 1 | sp\|O95409\|ZIC2_HUMAN | ZIC2 | 54.97 | 2.7592 |
| 1 | 1 | sp\|Q3SXM5\|HSDL1_HUMAN | HSDL1 | 36.98 | 2.7545 |
| 1 | 1 | sp\|Q86Y39\|NDUAB_HUMAN | NDUFA11 | 14.84 | 2.7501 |
| 1 | 1 | sp\|Q9UBF2\|COPG2_HUMAN | COPG2 | 97.56 | 2.7403 |
| 1 | 1 | sp\|Q8TCJ2\|STT3B_HUMAN | STT3B | 93.61 | 2.736 |
| 1 | 1 | sp\|O14802\|RPC1_HUMAN | POLR3A | 155.54 | 2.7169 |
| 1 | 1 | sp\|Q15269\|PWP2_HUMAN | PWP2 | 102.39 | 2.711 |
| 1 | 1 | KV2A7_MOUSE | | 12.27 | 2.7025 |
| 1 | 1 | sp\|Q12830\|BPTF_HUMAN | BPTF | 338.05 | 2.6977 |
| 1 | 1 | sp\|Q8N8L6\|ARL10_HUMAN | ARL10 | 27.44 | 2.6741 |
| 1 | 1 | sp\|Q9Y697\|NFS1_HUMAN | NFS1 | 50.16 | 2.6592 |
| 1 | 1 | sp\|Q92797\|SYMPK_HUMAN | SYMPK | 141.06 | 2.6557 |
| 1 | 1 | sp\|Q9UI10\|EI2BD_HUMAN | EIF2B4 | 57.52 | 2.6485 |
| 1 | 1 | sp\|Q9BVQ7\|SPA5L_HUMAN | SPATA5L1 | 80.66 | 2.6331 |
| 1 | 1 | sp\|Q15388\|TOM20_HUMAN | TOMM20 | 16.29 | 2.6315 |
| 1 | 1 | sp\|P82933\|RT09_HUMAN | MRPS9 | 45.81 | 2.6192 |
| 1 | 1 | sp\|Q9BXW9\|FACD2_HUMAN | FANCD2 | 164.02 | 2.6144 |
| 1 | 1 | sp\|Q6PML9\|ZNT9_HUMAN | SLC30A9 | 63.47 | 2.6142 |
| 1 | 1 | sp\|Q8TBF5\|PIGX_HUMAN | PIGX | 28.77 | 2.6142 |
| 1 | 1 | sp\|Q9Y5J1\|UTP18_HUMAN | UTP18 | 61.96 | 2.6063 |
| 1 | 1 | sp\|Q86TJ2\|TAD2B_HUMAN | TADA2B | 48.44 | 2.5991 |
| 1 | 1 | sp\|P68366\|TBA4A_HUMAN | TUBA4A | 49.89 | 2.5969 |
| 1 | 1 | sp\|Q6DRA6\|H2B2D_HUMAN | HIST2H2BD | 18.01 | 2.5889 |
| 1 | 1 | sp\|Q9BWM7\|SFXN3_HUMAN | SFXN3 | 35.48 | 2.5811 |
| 1 | 1 | sp\|Q96H55\|MYO19_HUMAN | MYO19 | 109.07 | 2.5717 |
| 1 | 1 | sp\|Q9Y4F1\|FARP1_HUMAN | FARP1 | 118.56 | 2.5565 |
| 1 | 1 | sp\|Q8N684\|CPSF7_HUMAN | CPSF7 | 52.02 | 2.5537 |
| 1 | 1 | sp\|Q8NFQ8\|TOIP2_HUMAN | TOR1AIP2 | 51.23 | 2.5378 |
| 1 | 1 | sp\|O43823\|AKAP8_HUMAN | AKAP8 | 76.06 | 2.5116 |
| 1 | 1 | sp\|O15260\|SURF4_HUMAN | SURF4 | 30.37 | 2.5109 |
| 1 | 1 | sp\|P52948\|NUP98_HUMAN | NUP98 | 197.46 | 2.5109 |
| 1 | 1 | sp\|Q8WVM8\|SCFD1_HUMAN | SCFD1 | 72.33 | 2.4935 |
| 1 | 1 | sp\|P14678\|RSMB_HUMAN | SNRPB | 24.59 | 2.483 |
| 1 | 1 | sp\|Q12962\|TAF10_HUMAN | TAF10 | 21.7 | 2.4811 |
| 1 | 1 | sp\|Q8NB90\|SPAT5_HUMAN | SPATA5 | 97.84 | 2.4769 |
| 1 | 1 | tr\|Q96DP0\|Q96DP0_HUMAN | | 49.22 | 2.4718 |
| 1 | 1 | sp\|Q8NBU5\|ATAD1_HUMAN | ATAD1 | 40.72 | 2.4518 |
| 1 | 1 | sp\|P10515\|ODP2_HUMAN | DLAT | 68.95 | 2.4454 |
| 1 | 1 | sp\|Q643R3\|LPCT4_HUMAN | LPCAT4 | 57.18 | 2.4415 |
| 1 | 1 | sp\|P23258\|TBG1_HUMAN | TUBG1 | 51.14 | 2.4387 |
| 1 | 1 | sp\|Q9Y6K0\|CEPT1_HUMAN | CEPT1 | 46.52 | 2.4294 |
| 1 | 1 | sp\|Q9Y230\|RUVB2_HUMAN | RUVBL2 | 51.12 | 2.4188 |
| 1 | 1 | sp\|O60725\|ICMT_HUMAN | ICMT | 31.92 | 2.4021 |
| 1 | 1 | sp\|Q9BYW2\|SETD2_HUMAN | SETD2 | 287.42 | 2.3755 |
| 1 | 1 | sp\|Q8N4U5\|T11L2_HUMAN | TCP11L2 | 58.05 | 2.3706 |
| 1 | 1 | sp\|Q9H2V7\|SPNS1_HUMAN | SPNS1 | 56.59 | 2.3667 |
| 1 | 1 | sp\|Q9BSK2\|S2533_HUMAN | SLC25A33 | 35.35 | 2.3493 |
| 1 | 1 | sp\|P51530\|DNA2_HUMAN | DNA2 | 120.34 | 2.3388 |
| 1 | 1 | sp\|Q9Y265\|RUVB1_HUMAN | RUVBL1 | 50.2 | 2.3132 |
| 1 | 1 | sp\|Q15043\|S39AE_HUMAN | SLC39A14 | 54.18 | 2.3094 |
| 1 | 1 | sp\|Q6P4A7\|SFXN4_HUMAN | SFXN4 | 37.97 | 2.3065 |
| 1 | 1 | sp\|Q92878\|RAD50_HUMAN | RAD50 | 153.8 | 2.2886 |
| 1 | 1 | sp\|P31327\|CPSM_HUMAN | CPS1 | 164.83 | 2.2879 |
| 1 | 1 | sp\|P61353\|RL27_HUMAN | RPL27 | 15.79 | 2.2777 |
| 1 | 1 | sp\|Q8N6I1\|EID2_HUMAN | EID2 | 25.17 | 2.2718 |
| 1 | 1 | sp\|Q9NZJ7\|MTCH1_HUMAN | MTCH1 | 41.52 | 2.2539 |
| 1 | 1 | sp\|P33121\|ACSL1_HUMAN | ACSL1 | 77.89 | 2.2518 |
| 1 | 1 | sp\|Q8NHH9\|ATLA2_HUMAN | ATL2 | 66.19 | 2.2317 |
| 1 | 1 | sp\|Q7L2E3\|DHX30_HUMAN | DHX30 | 133.85 | 2.2277 |
| 1 | 1 | sp\|Q6VAB6\|KSR2_HUMAN | KSR2 | 107.56 | 2.2255 |
| 1 | 1 | sp\|Q9BVK2\|ALG8_HUMAN | ALG8 | 60.05 | 2.2052 |
| 1 | 1 | sp\|P35914\|HMGCL_HUMAN | HMGCL | 34.34 | 2.1941 |
| 1 | 1 | sp\|Q15526\|SURF1_HUMAN | SURF1 | 33.31 | 2.1791 |
| 1 | 1 | sp\|O14681\|EI24_HUMAN | EI24 | 38.94 | 2.1725 |
| 1 | 1 | sp\|Q9ULD4\|BRPF3_HUMAN | BRPF3 | 135.66 | 2.1675 |
| 1 | 1 | sp\|Q02539\|H11_HUMAN | HIST1H1A | 21.83 | 2.15 |

TABLE 5C
HA-SS18WT_CHR_peptides

| Unique | Total | reference | Gene Symbol | MWT(kDa) | AVG |
|---|---|---|---|---|---|
| 43 | 156 | sp\|P51532\|SMCA4_HUMAN | SMARCA4 | 184.53 | 3.0834 |
| 46 | 128 | sp\|P51531\|SMCA2_HUMAN | SMARCA2 | 181.17 | 2.9702 |
| 8 | 108 | sp\|P33778\|H2B1B_HUMAN | HIST1H2BB | 13.94 | 2.3822 |
| 45 | 69 | sp\|O14497\|ARI1A_HUMAN | ARID1A | 241.89 | 3.2558 |
| 24 | 52 | sp\|Q8TAQ2\|SMRC2_HUMAN | SMARCC2 | 132.8 | 3.3159 |
| 34 | 50 | sp\|Q8NFD5\|ARI1B_HUMAN | ARID1B | 235.97 | 3.1174 |
| 24 | 43 | sp\|Q92922\|SMRC1_HUMAN | SMARCC1 | 122.79 | 3.4232 |
| 5 | 40 | sp\|Q96KK5\|H2A1H_HUMAN | HIST1H2AH | 13.9 | 2.7079 |
| 31 | 33 | sp\|Q14839\|CHD4_HUMAN | CHD4 | 217.87 | 3.3364 |
| 24 | 33 | sp\|Q08211\|DHX9_HUMAN | DHX9 | 140.87 | 3.1075 |
| 29 | 31 | sp\|Q14980\|NUMA1_HUMAN | NUMA1 | 238.12 | 3.7685 |
| 28 | 31 | sp\|Q6P2Q9\|PRP8_HUMAN | PRPF8 | 273.43 | 3.1678 |
| 21 | 31 | sp\|Q9NYF8\|BCLF1_HUMAN | BCLAF1 | 106.06 | 3.1061 |
| 29 | 30 | sp\|O75643\|U520_HUMAN | SNRNP200 | 244.35 | 3.4233 |
| 20 | 30 | sp\|Q6STE5\|SMRD3_HUMAN | SMARCD3 | 54.98 | 3.0867 |
| 24 | 29 | sp\|P11388\|TOP2A_HUMAN | TOP2A | 174.28 | 3.2664 |
| 15 | 29 | sp\|Q96GM5\|SMRD1_HUMAN | SMARCD1 | 58.2 | 3.3365 |
| 17 | 27 | sp\|Q00839\|HNRPU_HUMAN | HNRNPU | 90.53 | 3.1686 |
| 15 | 27 | sp\|P52272\|HNRPM_HUMAN | HNRNPM | 77.46 | 3.1827 |
| 11 | 27 | sp\|P22087\|FBRL_HUMAN | FBL | 33.76 | 3.0616 |
| 25 | 26 | sp\|O75691\|UTP20_HUMAN | UTP20 | 318.18 | 2.9961 |
| 25 | 25 | sp\|Q9H583\|HEAT1_HUMAN | HEATR1 | 242.22 | 3.3547 |
| 24 | 25 | sp\|Q8WYP5\|ELYS_HUMAN | AHCTF1 | 252.34 | 3.4786 |
| 9 | 25 | sp\|P62805\|H4_HUMAN | HIST1H4A | 11.36 | 2.9256 |
| 14 | 24 | sp\|Q9Y2X3\|NOP58_HUMAN | NOP58 | 59.54 | 3.8372 |
| 15 | 23 | sp\|Q9Y2W1\|TR150_HUMAN | THRAP3 | 108.6 | 2.9034 |
| 22 | 22 | sp\|Q14690\|RRP5_HUMAN | PDCD11 | 208.57 | 3.3884 |
| 18 | 22 | sp\|O00567\|NOP56_HUMAN | NOP56 | 66.01 | 3.6951 |
| 20 | 21 | sp\|Q9Y5B9\|SP16H_HUMAN | SUPT16H | 119.84 | 3.3847 |
| 13 | 21 | sp\|O76021\|RL1D1_HUMAN | RSL1D1 | 54.94 | 2.4994 |
| 12 | 21 | sp\|O96019\|ACL6A_HUMAN | ACTL6A | 47.43 | 3.0129 |
| 18 | 20 | sp\|Q02880\|TOP2B_HUMAN | TOP2B | 183.15 | 3.2243 |
| 19 | 19 | sp\|Q9UIG0\|BAZ1B_HUMAN | BAZ1B | 170.8 | 3.4521 |
| 16 | 19 | sp\|P08670\|VIME_HUMAN | VIM | 53.62 | 3.4552 |
| 10 | 19 | sp\|Q12824\|SNF5_HUMAN | SMARCB1 | 44.11 | 3.4839 |
| 18 | 18 | sp\|Q9NTI5\|PDS5B_HUMAN | PDS5B | 164.56 | 2.7474 |
| 16 | 17 | sp\|Q9H0A0\|NAT10_HUMAN | NAT10 | 115.66 | 3.0877 |
| 14 | 17 | sp\|Q969G3\|SMCE1_HUMAN | SMARCE1 | 46.62 | 3.741 |
| 6 | 17 | sp\|P62736\|ACTA_HUMAN | ACTA2 | 41.98 | 2.916 |
| 11 | 16 | sp\|Q9H307\|PININ_HUMAN | PNN | 81.56 | 3.2407 |
| 10 | 16 | sp\|P43243\|MATR3_HUMAN | MATR3 | 94.56 | 3.0893 |
| 6 | 16 | sp\|P63261\|ACTG_HUMAN | ACTG1 | 41.77 | 3.2621 |
| 15 | 15 | sp\|Q03164\|KMT2A_HUMAN | KMT2A | 431.5 | 3.5526 |
| 15 | 15 | sp\|O75533\|SF3B1_HUMAN | SF3B1 | 145.74 | 3.4533 |
| 14 | 15 | sp\|O60264\|SMCA5_HUMAN | SMARCA5 | 121.83 | 2.9348 |
| 13 | 15 | sp\|Q08945\|SSRP1_HUMAN | SSRP1 | 81.02 | 3.2569 |
| 13 | 15 | sp\|Q9Y3T9\|NOC2L_HUMAN | NOC2L | 84.87 | 3.1816 |
| 6 | 15 | sp\|P07910\|HNRPC_HUMAN | HNRNPC | 33.65 | 2.9851 |
| 14 | 14 | sp\|Q6PL18\|ATAD2_HUMAN | ATAD2 | 158.46 | 3.699 |
| 13 | 14 | sp\|Q14683\|SMC1A_HUMAN | SMC1A | 143.14 | 3.4429 |
| 13 | 14 | sp\|Q96GQ7\|DDX27_HUMAN | DDX27 | 89.78 | 3.3349 |
| 13 | 14 | sp\|Q9UQE7\|SMC3_HUMAN | SMC3 | 141.45 | 3.3166 |
| 11 | 14 | sp\|Q12905\|ILF2_HUMAN | ILF2 | 43.04 | 3.537 |
| 11 | 14 | sp\|Q13601\|KRR1_HUMAN | KRR1 | 43.64 | 3.053 |
| 11 | 14 | sp\|Q9BQG0\|MBB1A_HUMAN | MYBBP1A | 148.76 | 2.9411 |
| 5 | 14 | IGH1M_MOUSE | lghg1 | 43.36 | 2.7484 |
| 13 | 13 | sp\|P20700\|LMNB1_HUMAN | LMNB1 | 66.37 | 3.6005 |
| 13 | 13 | sp\|P78527\|PRKDC_HUMAN | PRKDC | 468.79 | 3.1715 |
| 12 | 13 | sp\|Q9UKV3\|ACINU_HUMAN | ACIN1 | 151.77 | 3.2842 |
| 11 | 13 | sp\|Q92925\|SMRD2_HUMAN | SMARCD2 | 58.88 | 3.4743 |
| 11 | 13 | sp\|Q9ULI0\|ATD2B_HUMAN | ATAD2B | 164.81 | 2.9966 |
| 10 | 13 | sp\|Q92785\|REQU_HUMAN | DPF2 | 44.13 | 3.5859 |
| 8 | 13 | sp\|Q14978\|NOLC1_HUMAN | NOLC1 | 73.56 | 2.752 |
| 12 | 12 | sp\|Q8IY81\|SPB1_HUMAN | FTSJ3 | 96.5 | 3.5724 |
| 12 | 12 | sp\|P33993\|MCM7_HUMAN | MCM7 | 81.26 | 3.0588 |
| 11 | 12 | sp\|Q8WWQ0\|PHIP_HUMAN | PHIP | 206.56 | 3.385 |
| 10 | 12 | sp\|P46087\|NOP2_HUMAN | NOP2 | 89.25 | 3.5911 |
| 9 | 12 | sp\|Q9H2P0\|ADNP_HUMAN | ADNP | 123.49 | 3.844 |
| 10 | 11 | sp\|Q9NZM4\|BICRA_HUMAN | BICRA | 158.39 | 3.6731 |
| 10 | 11 | sp\|Q15029\|U5S1_HUMAN | EFTUD2 | 109.37 | 3.5515 |
| 10 | 11 | sp\|P18583\|SON_HUMAN | SON | 263.66 | 3.4212 |
| 10 | 10 | sp\|Q7Z3K3\|POGZ_HUMAN | POGZ | 155.24 | 3.1926 |
| 10 | 10 | sp\|Q6KC79\|NIPBL_HUMAN | NIPBL | 315.85 | 3.1909 |
| 10 | 10 | sp\|P46013\|KI67_HUMAN | MKI67 | 358.47 | 2.9203 |
| 9 | 10 | sp\|Q12906\|ILF3_HUMAN | ILF3 | 95.28 | 3.5285 |
| 9 | 10 | sp\|Q86U86\|PB1_HUMAN | PBRM1 | 192.83 | 3.1412 |
| 9 | 10 | sp\|Q96T58\|MINT_HUMAN | SPEN | 402 | 3.1272 |
| 9 | 10 | sp\|O60216\|RAD21_HUMAN | RAD21 | 71.64 | 3.0948 |
| 8 | 10 | sp\|Q9Y2R4\|DDX52_HUMAN | DDX52 | 67.46 | 3.9244 |
| 7 | 10 | sp\|Q07955\|SRSF1_HUMAN | SRSF1 | 27.73 | 2.7409 |
| 9 | 9 | sp\|O14646\|CHD1_HUMAN | CHD1 | 196.57 | 4.0207 |
| 9 | 9 | sp\|Q99459\|CDC5L_HUMAN | CDC5L | 92.19 | 3.7929 |
| 9 | 9 | sp\|O43143\|DHX15_HUMAN | DHX15 | 90.88 | 3.4603 |
| 9 | 9 | sp\|O75367\|H2AY_HUMAN | H2AFY | 39.59 | 3.3062 |
| 9 | 9 | sp\|Q15393\|SF3B3_HUMAN | SF3B3 | 135.49 | 3.3021 |
| 9 | 9 | sp\|P24928\|RPB1_HUMAN | POLR2A | 217.04 | 3.2373 |
| 9 | 9 | sp\|Q9NVP1\|DDX18_HUMAN | DDX18 | 75.36 | 3.2151 |
| 9 | 9 | sp\|Q8IXT5\|RB12B_HUMAN | RBM12B | 118.03 | 3.1281 |
| 9 | 9 | sp\|P17480\|UBF1_HUMAN | UBTF | 89.35 | 3.0431 |
| 9 | 9 | sp\|Q9NR30\|DDX21_HUMAN | DDX21 | 87.29 | 2.897 |
| 9 | 9 | sp\|Q9UJV9\|DDX41_HUMAN | DDX41 | 69.79 | 2.7643 |
| 7 | 9 | sp\|Q96T23\|RSF1_HUMAN | RSF1 | 163.72 | 3.2299 |
| 7 | 9 | sp\|P55795\|HNRH2_HUMAN | HNRNPH2 | 49.23 | 2.8092 |
| 6 | 9 | sp\|Q86VM9\|ZCH18_HUMAN | ZC3H18 | 106.32 | 2.8814 |
| 5 | 9 | sp\|Q8WUZ0\|BCL7C_HUMAN | BCL7C | 23.45 | 3.9306 |
| 4 | 9 | sp\|Q4VC05\|BCL7A_HUMAN | BCL7A | 22.8 | 3.6922 |
| 8 | 8 | sp\|Q8WTT2\|NOC3L_HUMAN | NOC3L | 92.49 | 3.9612 |
| 8 | 8 | sp\|P55265\|DSRAD_HUMAN | ADAR | 135.98 | 3.7284 |
| 8 | 8 | sp\|Q8TDD1\|DDX54_HUMAN | DDX54 | 98.53 | 3.4328 |
| 8 | 8 | sp\|Q9UQ35\|SRRM2_HUMAN | SRRM2 | 299.44 | 3.0215 |
| 7 | 8 | sp\|Q9NY61\|AATF_HUMAN | AATF | 63.09 | 3.6956 |
| 7 | 8 | sp\|Q1KMD3\|HNRL2_HUMAN | HNRNPUL2 | 85.05 | 3.1539 |
| 6 | 8 | sp\|Q49A26\|GLYR1_HUMAN | GLYR1 | 60.52 | 3.8419 |
| 6 | 8 | sp\|Q9P0M6\|H2AW_HUMAN | H2AFY2 | 40.03 | 3.6549 |
| 6 | 8 | sp\|B2RXH8\|HNRC2_HUMAN | HNRNPCL2 | 32.05 | 2.8517 |
| 7 | 7 | sp\|Q13435\|SF3B2_HUMAN | SF3B2 | 100.16 | 3.6675 |
| 7 | 7 | sp\|Q14676\|MDC1_HUMAN | MDC1 | 226.53 | 3.6627 |
| 7 | 7 | sp\|Q9H6F5\|CCD86_HUMAN | CCDC86 | 40.21 | 3.6182 |
| 7 | 7 | sp\|Q12788\|TBL3_HUMAN | TBL3 | 88.98 | 3.609 |
| 7 | 7 | sp\|Q9H8M2\|BRD9_HUMAN | BRD9 | 66.96 | 3.5025 |
| 7 | 7 | sp\|Q8TDL5\|BPIB1_HUMAN | BPIFB1 | 52.41 | 3.4522 |
| 7 | 7 | sp\|P50402\|EMD_HUMAN | EMD | 28.98 | 3.4145 |
| 7 | 7 | sp\|P19338\|NUCL_HUMAN | NCL | 76.57 | 3.3742 |
| 7 | 7 | sp\|Q12873\|CHD3_HUMAN | CHD3 | 226.45 | 3.1365 |
| 7 | 7 | sp\|Q9BZE4\|NOG1_HUMAN | GTPBP4 | 73.92 | 3.0581 |
| 7 | 7 | sp\|Q8IWA0\|WDR75_HUMAN | WDR75 | 94.44 | 3.0082 |
| 7 | 7 | sp\|P28370\|SMCA1_HUMAN | SMARCA1 | 122.53 | 2.9683 |
| 7 | 7 | sp\|Q92841\|DDX17_HUMAN | DDX17 | 80.22 | 2.9366 |
| 7 | 7 | sp\|Q8N1F7\|NUP93_HUMAN | NUP93 | 93.43 | 2.9068 |
| 7 | 7 | sp\|Q6ZRS2\|SRCAP_HUMAN | SRCAP | 343.34 | 2.8432 |
| 7 | 7 | sp\|Q03188\|CENPC_HUMAN | CENPC | 106.77 | 2.6862 |
| 6 | 7 | sp\|O00566\|MPP10_HUMAN | MPHOSPH10 | 78.82 | 3.9439 |
| 6 | 7 | sp\|Q9H9B4\|SFXN1_HUMAN | SFXN1 | 35.6 | 3.5359 |
| 6 | 7 | sp\|O60306\|AQR_HUMAN | AQR | 171.19 | 3.4683 |
| 6 | 7 | sp\|P62995\|TRA2B_HUMAN | TRA2B | 33.65 | 3.0926 |
| 6 | 7 | sp\|Q8N8A6\|DDX51_HUMAN | DDX51 | 72.41 | 3.0592 |
| 5 | 7 | sp\|Q5QJE6\|TDIF2_HUMAN | DNTTIP2 | 84.42 | 3.1584 |
| 4 | 7 | sp\|P16403\|H12_HUMAN | HIST1H1C | 21.35 | 3.2204 |
| 6 | 6 | sp\|Q9HCS7\|SYF1_HUMAN | XAB2 | 99.95 | 3.9611 |
| 6 | 6 | sp\|Q9Y5B6\|PAXB1_HUMAN | PAXBP1 | 104.74 | 3.8492 |
| 6 | 6 | sp\|O60281\|ZN292_HUMAN | ZNF292 | 304.62 | 3.8342 |
| 6 | 6 | sp\|Q14692\|BMS1_HUMAN | BMS1 | 145.72 | 3.8277 |
| 6 | 6 | sp\|Q9BVP2\|GNL3_HUMAN | GNL3 | 61.95 | 3.8227 |
| 6 | 6 | sp\|Q14202\|ZMYM3_HUMAN | ZMYM3 | 152.28 | 3.5194 |
| 6 | 6 | sp\|Q8N3U4\|STAG2_HUMAN | STAG2 | 141.24 | 3.5054 |
| 6 | 6 | sp\|Q9NVH2\|INT7_HUMAN | INTS7 | 106.77 | 3.419 |
| 6 | 6 | sp\|P49792\|RBP2_HUMAN | RANBP2 | 357.97 | 3.3617 |
| 6 | 6 | sp\|Q9UK61\|TASOR_HUMAN | FAM208A | 188.91 | 3.0003 |
| 6 | 6 | sp\|Q9UKM9\|RALY_HUMAN | RALY | 32.44 | 2.8877 |
| 6 | 6 | sp\|Q96PK6\|RBM14_HUMAN | RBM14 | 69.45 | 2.8047 |
| 5 | 6 | sp\|O00159\|MYO1C_HUMAN | MYO1C | 121.61 | 4.3268 |
| 5 | 6 | sp\|Q6NSZ9\|ZSC25_HUMAN | ZSCAN25 | 61.44 | 3.5224 |
| 5 | 6 | sp\|Q7Z7K6\|CENPV_HUMAN | CENPV | 29.93 | 3.357 |
| 5 | 6 | sp\|P68371\|TBB4B_HUMAN | TUBB4B | 49.8 | 3.1922 |
| 5 | 6 | sp\|Q9BVJ6\|UT14A_HUMAN | UTP14A | 87.92 | 3.1504 |
| 5 | 6 | sp\|Q96KR1\|ZFR_HUMAN | ZFR | 116.94 | 2.9326 |
| 5 | 6 | sp\|P62277\|RS13_HUMAN | RPS13 | 17.21 | 2.654 |
| 4 | 6 | sp\|P31943\|HNRH1_HUMAN | HNRNPH1 | 49.2 | 3.278 |
| 4 | 6 | sp\|Q16629\|SRSF7_HUMAN | SRSF7 | 27.35 | 2.6251 |
| 2 | 6 | sp\|Q5BKZ1\|ZN326_HUMAN | ZNF326 | 65.61 | 2.8796 |
| 2 | 6 | sp\|Q93079\|H2B1H_HUMAN | HIST1H2BH | 13.88 | 2.0968 |
| 5 | 5 | sp\|Q99549\|MPP8_HUMAN | MPHOSPH8 | 97.12 | 4.0198 |
| 5 | 5 | sp\|P33991\|MCM4_HUMAN | MCM4 | 96.5 | 3.8766 |
| 5 | 5 | sp\|Q14137\|BOP1_HUMAN | BOP1 | 83.58 | 3.8261 |
| 5 | 5 | sp\|Q15269\|PWP2_HUMAN | PWP2 | 102.39 | 3.7907 |
| 5 | 5 | sp\|Q03701\|CEBPZ_HUMAN | CEBPZ | 120.9 | 3.7691 |
| 5 | 5 | sp\|P57740\|NU107_HUMAN | NUP107 | 106.31 | 3.6565 |
| 5 | 5 | sp\|Q86YP4\|P66A_HUMAN | GATAD2A | 68.02 | 3.5678 |
| 5 | 5 | sp\|Q9BSC4\|NOL10_HUMAN | NOL10 | 80.25 | 3.5655 |
| 5 | 5 | sp\|Q8TED0\|UTP15_HUMAN | UTP15 | 58.38 | 3.526 |
| 5 | 5 | sp\|P25440\|BRD2_HUMAN | BRD2 | 88.01 | 3.4882 |
| 5 | 5 | sp\|Q9NXF1\|TEX10_HUMAN | TEX10 | 105.61 | 3.4606 |
| 5 | 5 | sp\|Q15459\|SF3A1_HUMAN | SF3A1 | 88.83 | 3.4356 |
| 5 | 5 | sp\|P07199\|CENPB_HUMAN | CENPB | 65.13 | 3.4356 |
| 5 | 5 | sp\|Q9BYG3\|MK67I_HUMAN | NIFK | 34.2 | 3.296 |
| 5 | 5 | sp\|Q8N7H5\|PAF1_HUMAN | PAF1 | 59.94 | 3.2547 |
| 5 | 5 | sp\|Q13620\|CUL4B_HUMAN | CUL4B | 103.92 | 3.2437 |
| 5 | 5 | sp\|P52701\|MSH6_HUMAN | MSH6 | 152.69 | 3.2215 |
| 5 | 5 | sp\|P62424\|RL7A_HUMAN | RPL7A | 29.98 | 3.2058 |
| 5 | 5 | sp\|Q15397\|PUM3_HUMAN | PUM3 | 73.54 | 3.2016 |
| 5 | 5 | sp\|Q9NQS7\|INCE_HUMAN | INCENP | 105.36 | 3.0804 |
| 5 | 5 | sp\|Q9H8H0\|NOL11_HUMAN | NOL11 | 81.07 | 2.9959 |
| 5 | 5 | sp\|O43390\|HNRPR_HUMAN | HNRNPR | 70.9 | 2.9694 |
| 5 | 5 | sp\|Q96H22\|CENPN_HUMAN | CENPN | 39.53 | 2.9578 |
| 5 | 5 | sp\|P45880\|VDAC2_HUMAN | VDAC2 | 31.55 | 2.9465 |
| 5 | 5 | sp\|Q6AI39\|BICRL_HUMAN | BICRAL | 115.01 | 2.8687 |
| 5 | 5 | sp\|P46100\|ATRX_HUMAN | ATRX | 282.41 | 2.8152 |
| 5 | 5 | sp\|Q9UIF9\|BAZ2A_HUMAN | BAZ2A | 211.07 | 2.7088 |
| 4 | 5 | sp\|Q9Y5J1\|UTP18_HUMAN | UTP18 | 61.96 | 3.2081 |
| 4 | 5 | sp\|Q92794\|KAT6A_HUMAN | KAT6A | 224.89 | 2.736 |
| 2 | 5 | sp\|Q15532\|SSXT_HUMAN | SS18 | 45.9 | 3.3233 |
| 1 | 5 | tr\|Q6PJV4\|Q6PJV4_HUMAN | THRAP3 | 41.83 | 3.8114 |
| 4 | 4 | sp\|P61978\|HNRPK_HUMAN | HNRNPK | 50.94 | 4.6312 |
| 4 | 4 | sp\|O96028\|NSD2_HUMAN | NSD2 | 152.16 | 4.0798 |
| 4 | 4 | sp\|Q9NYH9\|UTP6_HUMAN | UTP6 | 70.15 | 3.9237 |
| 4 | 4 | sp\|Q12931\|TRAP1_HUMAN | TRAP1 | 80.06 | 3.661 |
| 4 | 4 | sp\|Q16531\|DDB1_HUMAN | DDB1 | 126.89 | 3.4707 |
| 4 | 4 | sp\|Q15287\|RNPS1_HUMAN | RNPS1 | 34.19 | 3.4291 |
| 4 | 4 | sp\|P51398\|RT29_HUMAN | DAP3 | 45.54 | 3.3906 |
| 4 | 4 | sp\|P05412\|JUN_HUMAN | JUN | 35.65 | 3.3333 |
| 4 | 4 | sp\|P15880\|RS2_HUMAN | RPS2 | 31.3 | 3.2743 |
| 4 | 4 | sp\|P38159\|RBMX_HUMAN | RBMX | 42.31 | 3.2614 |
| 4 | 4 | sp\|Q8WXH0\|SYNE2_HUMAN | SYNE2 | 795.94 | 3.2386 |
| 4 | 4 | sp\|Q9Y4W2\|LAS1L_HUMAN | LAS1L | 83.01 | 3.218 |
| 4 | 4 | sp\|Q8WXI9\|P66B_HUMAN | GATAD2B | 65.22 | 3.2163 |
| 4 | 4 | sp\|P21796\|VDAC1_HUMAN | VDAC1 | 30.75 | 3.1761 |
| 4 | 4 | sp\|O94776\|MTA2_HUMAN | MTA2 | 74.98 | 3.1723 |
| 4 | 4 | sp\|Q16891\|MIC60_HUMAN | IMMT | 83.63 | 3.1454 |
| 4 | 4 | sp\|Q9Y2P8\|RCL1_HUMAN | RCL1 | 40.82 | 3.1052 |
| 4 | 4 | sp\|O75400\|PR40A_HUMAN | PRPF40A | 108.74 | 3.1025 |
| 4 | 4 | sp\|Q9UJS0\|CMC2_HUMAN | SLC25A13 | 74.13 | 3.0994 |
| 4 | 4 | sp\|P06733\|ENOA_HUMAN | ENO1 | 47.14 | 3.0929 |
| 4 | 4 | sp\|O60287\|NPA1P_HUMAN | URB1 | 254.23 | 3.0688 |
| 4 | 4 | sp\|P11498\|PYC_HUMAN | PC | 129.55 | 3.0253 |
| 4 | 4 | sp\|P11021\|GRP78_HUMAN | HSPA5 | 72.29 | 2.9973 |
| 4 | 4 | sp\|Q92621\|NU205_HUMAN | NUP205 | 227.78 | 2.9481 |
| 4 | 4 | sp\|P06576\|ATPB_HUMAN | ATP5B | 56.52 | 2.8745 |
| 4 | 4 | sp\|Q68CP9\|ARID2_HUMAN | ARID2 | 197.27 | 2.8522 |
| 4 | 4 | sp\|P18124\|RL7_HUMAN | RPL7 | 29.21 | 2.7909 |
| 4 | 4 | sp\|Q9H582\|ZN644_HUMAN | ZNF644 | 149.47 | 2.7228 |
| 4 | 4 | sp\|P17844\|DDX5_HUMAN | DDX5 | 69.1 | 2.7058 |
| 4 | 4 | sp\|Q96ME7\|ZN512_HUMAN | ZNF512 | 64.64 | 2.6681 |
| 4 | 4 | sp\|Q5VWN6\|F208B_HUMAN | FAM208B | 268.68 | 2.5746 |
| 4 | 4 | sp\|P36578\|RL4_HUMAN | RPL4 | 47.67 | 2.534 |
| 4 | 4 | sp\|P49756\|RBM25_HUMAN | RBM25 | 100.12 | 2.5337 |
| 4 | 4 | sp\|P49750\|YLPM1_HUMAN | YLPM1 | 219.85 | 2.2901 |
| 3 | 4 | tr\|B2R5W2\|B2R5W2_HUMAN | HNRNPC | 31.93 | 4.877 |
| 3 | 4 | sp\|P62701\|RS4X_HUMAN | RPS4X | 29.58 | 3.4819 |
| 3 | 4 | sp\|Q96KQ7\|EHMT2_HUMAN | EHMT2 | 132.29 | 3.1695 |
| 3 | 4 | sp\|P62987\|RL40_HUMAN | UBA52 | 14.72 | 3.1637 |
| 3 | 4 | sp\|Q9NU22\|MDN1_HUMAN | MDN1 | 632.42 | 3.0818 |
| 3 | 4 | sp\|Q9H501\|ESF1_HUMAN | ESF1 | 98.73 | 2.9547 |
| 3 | 4 | IGKC_MOUSE | | 11.77 | 2.9149 |
| 3 | 4 | sp\|Q12769\|NU160_HUMAN | NUP160 | 162.02 | 2.8295 |
| 3 | 4 | sp\|Q5JTH9\|RRP12_HUMAN | RRP12 | 143.61 | 2.7939 |
| 3 | 4 | sp\|Q9Y277\|VDAC3_HUMAN | VDAC3 | 30.64 | 2.7441 |
| 3 | 4 | sp\|Q13247\|SRSF6_HUMAN | SRSF6 | 39.56 | 2.6268 |
| 2 | 4 | sp\|Q96PV6\|LENG8_HUMAN | LENG8 | 86.07 | 2.0279 |
| 3 | 3 | sp\|Q15061\|WDR43_HUMAN | WDR43 | 74.84 | 4.5687 |
| 3 | 3 | sp\|Q13185\|CBX3_HUMAN | CBX3 | 20.8 | 4.3351 |
| 3 | 3 | sp\|Q969X6\|UTP4_HUMAN | UTP4 | 76.84 | 4.238 |
| 3 | 3 | sp\|Q7L2E3\|DHX30_HUMAN | DHX30 | 133.85 | 4.2339 |
| 3 | 3 | sp\|Q9Y3C1\|NOP16_HUMAN | NOP16 | 21.18 | 4.2066 |
| 3 | 3 | sp\|A8CG34\|P121C_HUMAN | POM121C | 124.98 | 4.0062 |
| 3 | 3 | sp\|P25705\|ATPA_HUMAN | ATP5A1 | 59.71 | 3.966 |
| 3 | 3 | sp\|Q9BQE3\|TBA1C_HUMAN | TUBA1C | 49.86 | 3.8249 |
| 3 | 3 | sp\|Q5SSJ5\|HP1B3_HUMAN | HP1BP3 | 61.17 | 3.8158 |
| 3 | 3 | sp\|P62753\|RS6_HUMAN | RPS6 | 28.66 | 3.8152 |
| 3 | 3 | sp\|Q96QD9\|UIF_HUMAN | FYTTD1 | 35.8 | 3.7604 |
| 3 | 3 | sp\|P52597\|HNRPF_HUMAN | HNRNPF | 45.64 | 3.7157 |
| 3 | 3 | sp\|Q9BUJ2\|HNRL1_HUMAN | HNRNPUL1 | 95.68 | 3.6878 |
| 3 | 3 | sp\|P31942\|HNRH3_HUMAN | HNRNPH3 | 36.9 | 3.6784 |
| 3 | 3 | sp\|Q9H9B1\|EHMT1_HUMAN | EHMT1 | 141.38 | 3.6655 |
| 3 | 3 | sp\|Q6PD62\|CTR9_HUMAN | CTR9 | 133.42 | 3.5951 |
| 3 | 3 | sp\|O15213\|WDR46_HUMAN | WDR46 | 68.03 | 3.5419 |
| 3 | 3 | sp\|Q9NQ55\|SSF1_HUMAN | PPAN | 53.16 | 3.5364 |
| 3 | 3 | sp\|Q9GZR7\|DDX24_HUMAN | DDX24 | 96.27 | 3.5302 |
| 3 | 3 | sp\|Q9BVI4\|NOC4L_HUMAN | NOC4L | 58.43 | 3.5196 |
| 3 | 3 | sp\|P49411\|EFTU_HUMAN | TUFM | 49.51 | 3.4818 |
| 3 | 3 | tr\|F8VXC8\|F8VXC8_HUMAN | SMARCC2 | 136.1 | 3.4615 |
| 3 | 3 | sp\|Q13330\|MTA1_HUMAN | MTA1 | 80.74 | 3.4299 |
| 3 | 3 | sp\|Q8TDI0\|CHD5_HUMAN | CHD5 | 222.91 | 3.4258 |
| 3 | 3 | sp\|P02545\|LMNA_HUMAN | LMNA | 74.09 | 3.4069 |
| 3 | 3 | tr\|A0A1P0AZG4\|A0A1P0AZG4_HUMAN | LCOR | 137.14 | 3.3907 |
| 3 | 3 | sp\|Q8IZL8\|PELP1_HUMAN | PELP1 | 119.62 | 3.3676 |
| 3 | 3 | sp\|Q9BQE9\|BCL7B_HUMAN | BCL7B | 22.18 | 3.2712 |
| 3 | 3 | sp\|P68104\|EF1A1_HUMAN | EEF1A1 | 50.11 | 3.2285 |
| 3 | 3 | sp\|Q9UMS4\|PRP19_HUMAN | PRPF19 | 55.15 | 3.2237 |
| 3 | 3 | sp\|P14618\|KPYM_HUMAN | PKM | 57.9 | 3.2008 |
| 3 | 3 | sp\|P56537\|IF6_HUMAN | EIF6 | 26.58 | 3.1738 |
| 3 | 3 | sp\|P04406\|G3P_HUMAN | GAPDH | 36.03 | 3.1734 |
| 3 | 3 | sp\|Q9NRL2\|BAZ1A_HUMAN | BAZ1A | 178.59 | 3.1621 |
| 3 | 3 | sp\|Q96G21\|IMP4_HUMAN | IMP4 | 33.74 | 3.1542 |
| 3 | 3 | sp\|P78316\|NOP14_HUMAN | NOP14 | 97.61 | 3.0703 |
| 3 | 3 | sp\|Q9H0D6\|XRN2_HUMAN | XRN2 | 108.51 | 3.0665 |
| 3 | 3 | sp\|P56182\|RRP1_HUMAN | RRP1 | 52.81 | 3.0433 |
| 3 | 3 | sp\|Q15050\|RRS1_HUMAN | RRS1 | 41.17 | 2.9918 |
| 3 | 3 | sp\|Q9H8H2\|DDX31_HUMAN | DDX31 | 94.03 | 2.9841 |
| 3 | 3 | sp\|P42285\|SK2L2_HUMAN | SKIV2L2 | 117.73 | 2.9221 |
| 3 | 3 | sp\|P09874\|PARP1_HUMAN | PARP1 | 113.01 | 2.9162 |
| 3 | 3 | sp\|Q99848\|EBP2_HUMAN | EBNA1BP2 | 34.83 | 2.9109 |
| 3 | 3 | sp\|Q96T37\|RBM15_HUMAN | RBM15 | 107.12 | 2.894 |
| 3 | 3 | sp\|P32119\|PRDX2_HUMAN | PRDX2 | 21.88 | 2.8741 |
| 3 | 3 | sp\|O95793\|STAU1_HUMAN | STAU1 | 63.14 | 2.8703 |
| 3 | 3 | sp\|Q9UGU0\|TCF20_HUMAN | TCF20 | 211.64 | 2.8664 |
| 3 | 3 | sp\|P62750\|RL23A_HUMAN | RPL23A | 17.68 | 2.8052 |
| 3 | 3 | sp\|P42167\|LAP2B_HUMAN | TMPO | 50.64 | 2.7995 |
| 3 | 3 | sp\|P61313\|RL15_HUMAN | RPL15 | 24.13 | 2.793 |
| 3 | 3 | sp\|P23396\|RS3_HUMAN | RPS3 | 26.67 | 2.7615 |
| 3 | 3 | sp\|Q6P0N0\|M18BP_HUMAN | MIS18BP1 | 129.01 | 2.7492 |
| 3 | 3 | sp\|Q53HL2\|BOREA_HUMAN | CDCA8 | 31.3 | 2.7294 |
| 3 | 3 | sp\|Q8N9T8\|KRI1_HUMAN | KRI1 | 82.55 | 2.7263 |
| 3 | 3 | sp\|P38432\|COIL_HUMAN | COIL | 62.57 | 2.6522 |
| 3 | 3 | sp\|Q5JTV8\|TOIP1_HUMAN | TOR1AIP1 | 66.21 | 2.5133 |
| 3 | 3 | sp\|P52292\|IMA1_HUMAN | KPNA2 | 57.83 | 2.5042 |
| 3 | 3 | sp\|Q9NZM5\|GSCR2_HUMAN | GLTSCR2 | 54.36 | 2.4664 |
| 3 | 3 | sp\|Q9HC52\|CBX8_HUMAN | CBX8 | 43.37 | 2.4195 |
| 3 | 3 | sp\|P62851\|RS25_HUMAN | RPS25 | 13.73 | 2.387 |
| 3 | 3 | sp\|Q8NI36\|WDR36_HUMAN | WDR36 | 105.26 | 2.3862 |
| 3 | 3 | sp\|Q02878\|RL6_HUMAN | RPL6 | 32.71 | 2.3594 |
| 3 | 3 | sp\|P46781\|RS9_HUMAN | RPS9 | 22.58 | 2.3229 |
| 3 | 3 | sp\|Q9NVI7\|ATD3A_HUMAN | ATAD3A | 71.32 | 2.1869 |
| 2 | 3 | sp\|Q14103\|HNRPD_HUMAN | HNRNPD | 38.41 | 3.6101 |
| 2 | 3 | sp\|Q02539\|H11_HUMAN | HIST1H1A | 21.83 | 2.8548 |
| 2 | 3 | sp\|Q71UI9\|H2AV_HUMAN | H2AFV | 13.5 | 2.7277 |
| 2 | 3 | sp\|Q13610\|PWP1_HUMAN | PWP1 | 55.79 | 2.6004 |
| 2 | 3 | sp\|O15226\|NKRF_HUMAN | NKRF | 77.62 | 2.3415 |
| 2 | 3 | sp\|P84103\|SRSF3_HUMAN | SRSF3 | 19.32 | 2.2047 |
| 1 | 3 | sp\|P07305\|H10_HUMAN | H1F0 | 20.85 | 3.9925 |
| 1 | 3 | sp\|P16104\|H2AX_HUMAN | H2AFX | 15.14 | 3.8965 |
| 2 | 2 | sp\|Q9NS69\|TOM22_HUMAN | TOMM22 | 15.51 | 5.0427 |
| 2 | 2 | sp\|P32455\|GBP1_HUMAN | GBP1 | 67.89 | 4.7845 |
| 2 | 2 | sp\|Q14498\|RBM39_HUMAN | RBM39 | 59.34 | 4.5672 |
| 2 | 2 | sp\|P78364\|PHC1_HUMAN | PHC1 | 105.47 | 4.4038 |
| 2 | 2 | sp\|P62241\|RS8_HUMAN | RPS8 | 24.19 | 4.3331 |
| 2 | 2 | sp\|Q96EU6\|RRP36_HUMAN | RRP36 | 29.8 | 4.2929 |
| 2 | 2 | sp\|P83916\|CBX1_HUMAN | CBX1 | 21.4 | 4.1311 |
| 2 | 2 | sp\|O14983\|AT2A1_HUMAN | ATP2A1 | 110.18 | 4.1184 |
| 2 | 2 | sp\|P35580\|MYH10_HUMAN | MYH10 | 228.86 | 4.1122 |
| 2 | 2 | sp\|P49711\|CTCF_HUMAN | CTCF | 82.73 | 4.0754 |
| 2 | 2 | sp\|O95251\|KAT7_HUMAN | KAT7 | 70.6 | 4.0575 |
| 2 | 2 | sp\|P35453\|HXD13_HUMAN | HOXD13 | 36.08 | 4.0572 |
| 2 | 2 | sp\|Q07020\|RL18_HUMAN | RPL18 | 21.62 | 4.0568 |
| 2 | 2 | sp\|Q92769\|HDAC2_HUMAN | HDAC2 | 55.33 | 4.028 |
| 2 | 2 | sp\|Q9H7B2\|RPF2_HUMAN | RPF2 | 35.56 | 4.0267 |
| 2 | 2 | sp\|Q92784\|DPF3_HUMAN | DPF3 | 43.06 | 3.9575 |
| 2 | 2 | sp\|Q8WVM7\|STAG1_HUMAN | STAG1 | 144.34 | 3.8979 |
| 2 | 2 | sp\|Q9H4L4\|SENP3_HUMAN | SENP3 | 64.97 | 3.8924 |
| 2 | 2 | sp\|P39023\|RL3_HUMAN | RPL3 | 46.08 | 3.7618 |
| 2 | 2 | sp\|P67809\|YBOX1_HUMAN | YBX1 | 35.9 | 3.751 |
| 2 | 2 | sp\|Q8NEJ9\|NGDN_HUMAN | NGDN | 35.87 | 3.7496 |
| 2 | 2 | sp\|Q13111\|CAF1A_HUMAN | CHAF1A | 106.86 | 3.7075 |
| 2 | 2 | sp\|O00267\|SPT5H_HUMAN | SUPT5H | 120.92 | 3.697 |
| 2 | 2 | sp\|Q6DKI1\|RL7L_HUMAN | RPL7L1 | 28.64 | 3.6794 |
| 2 | 2 | sp\|Q5VZL5\|ZMYM4_HUMAN | ZMYM4 | 172.68 | 3.6656 |
| 2 | 2 | sp\|Q9H7H0\|MET17_HUMAN | METTL17 | 50.7 | 3.6536 |
| 2 | 2 | sp\|O95983\|MBD3_HUMAN | MBD3 | 32.82 | 3.6402 |
| 2 | 2 | sp\|P32969\|RL9_HUMAN | RPL9 | 21.85 | 3.6356 |
| 2 | 2 | tr\|B2RC06\|B2RC06_HUMAN | | 39.25 | 3.6326 |
| 2 | 2 | sp\|Q92522\|H1X_HUMAN | H1FX | 22.47 | 3.6307 |
| 2 | 2 | sp\|P04792\|HSPB1_HUMAN | HSPB1 | 22.77 | 3.6296 |
| 2 | 2 | sp\|P05141\|ADT2_HUMAN | SLC25A5 | 32.83 | 3.6195 |
| 2 | 2 | sp\|P63244\|RACK1_HUMAN | RACK1 | 35.05 | 3.6189 |
| 2 | 2 | sp\|P04040\|CATA_HUMAN | CAT | 59.72 | 3.5759 |
| 2 | 2 | sp\|Q8WXF0\|SRS12_HUMAN | SRSF12 | 30.49 | 3.5688 |
| 2 | 2 | sp\|Q9Y6K1\|DNM3A_HUMAN | DNMT3A | 101.79 | 3.5118 |
| 2 | 2 | sp\|Q86WX3\|AROS_HUMAN | RPS19BP1 | 15.42 | 3.5097 |
| 2 | 2 | sp\|Q96GD4\|AURKB_HUMAN | AURKB | 39.29 | 3.4963 |
| 2 | 2 | sp\|Q96HW7\|INT4_HUMAN | INTS4 | 108.1 | 3.3641 |
| 2 | 2 | sp\|Q9NSI2\|F207A_HUMAN | FAM207A | 25.44 | 3.3636 |
| 2 | 2 | sp\|O75494\|SRS10_HUMAN | SRSF10 | 31.28 | 3.3457 |
| 2 | 2 | sp\|Q9NW13\|RBM28_HUMAN | RBM28 | 85.68 | 3.3224 |
| 2 | 2 | sp\|P62906\|RL10A_HUMAN | RPL10A | 24.82 | 3.319 |
| 2 | 2 | sp\|Q13123\|RED_HUMAN | IK | 65.56 | 3.3104 |
| 2 | 2 | sp\|Q8WUM0\|NU133_HUMAN | NUP133 | 128.9 | 3.3062 |
| 2 | 2 | sp\|P14678\|RSMB_HUMAN | SNRPB | 24.59 | 3.3027 |
| 2 | 2 | sp\|Q15517\|CDSN_HUMAN | CDSN | 51.49 | 3.2564 |
| 2 | 2 | sp\|P17661\|DESM_HUMAN | DES | 53.5 | 3.1482 |
| 2 | 2 | sp\|Q8NC56\|LEMD2_HUMAN | LEMD2 | 56.94 | 3.1402 |
| 2 | 2 | sp\|Q9UNQ2\|DIM1_HUMAN | DIMT1 | 35.21 | 3.1391 |
| 2 | 2 | sp\|Q00325\|MPCP_HUMAN | SLC25A3 | 40.07 | 3.1288 |
| 2 | 2 | sp\|Q9NP55\|BPIA1_HUMAN | BPIFA1 | 26.7 | 3.1215 |
| 2 | 2 | sp\|Q9BZJ0\|CRNL1_HUMAN | CRNKL1 | 100.39 | 3.1064 |
| 2 | 2 | sp\|Q9NV31\|IMP3_HUMAN | IMP3 | 21.84 | 3.0688 |
| 2 | 2 | sp\|O15523\|DDX3Y_HUMAN | DDX3Y | 73.11 | 3.0673 |
| 2 | 2 | sp\|Q53GS7\|GLE1_HUMAN | GLE1 | 79.79 | 3.0633 |
| 2 | 2 | sp\|Q15717\|ELAV1_HUMAN | ELAVL1 | 36.07 | 3.0494 |
| 2 | 2 | sp\|Q9BQF6\|SENP7_HUMAN | SENP7 | 119.58 | 3.0117 |
| 2 | 2 | sp\|P83731\|RL24_HUMAN | RPL24 | 17.77 | 3.0103 |
| 2 | 2 | sp\|P08574\|CY1_HUMAN | CYC1 | 35.4 | 2.999 |
| 2 | 2 | sp\|Q7KZ85\|SPT6H_HUMAN | SUPT6H | 198.95 | 2.9924 |
| 2 | 2 | sp\|P30050\|RL12_HUMAN | RPL12 | 17.81 | 2.9874 |
| 2 | 2 | sp\|Q15059\|BRD3_HUMAN | BRD3 | 79.49 | 2.943 |
| 2 | 2 | sp\|P62263\|RS14_HUMAN | RPS14 | 16.26 | 2.9348 |
| 2 | 2 | sp\|Q9Y6C9\|MTCH2_HUMAN | MTCH2 | 33.31 | 2.925 |
| 2 | 2 | sp\|P38919\|IF4A3_HUMAN | EIF4A3 | 46.84 | 2.9081 |
| 2 | 2 | sp\|Q8TAE8\|G45IP_HUMAN | GADD45GIP1 | 25.37 | 2.8833 |
| 2 | 2 | sp\|Q03252\|LMNB2_HUMAN | LMNB2 | 69.91 | 2.8508 |
| 2 | 2 | sp\|P22695\|QCR2_HUMAN | UQCRC2 | 48.41 | 2.8347 |
| 2 | 2 | sp\|Q5TAP6\|UT14C_HUMAN | UTP14C | 87.13 | 2.8136 |
| 2 | 2 | sp\|Q13595\|TRA2A_HUMAN | TRA2A | 32.67 | 2.7892 |
| 2 | 2 | sp\|P10599\|THIO_HUMAN | TXN | 11.73 | 2.7799 |
| 2 | 2 | sp\|Q9UHA3\|RLP24_HUMAN | RSL24D1 | 19.61 | 2.7718 |
| 2 | 2 | sp\|Q8N0S6\|CENPL_HUMAN | CENPL | 38.97 | 2.7494 |
| 2 | 2 | sp\|Q14781\|CBX2_HUMAN | CBX2 | 56.05 | 2.7332 |
| 2 | 2 | sp\|Q15910\|EZH2_HUMAN | EZH2 | 85.31 | 2.7153 |
| 2 | 2 | sp\|P62304\|RUXE_HUMAN | SNRPE | 10.8 | 2.7029 |
| 2 | 2 | sp\|Q99590\|SCAFB_HUMAN | SCAF11 | 164.55 | 2.6846 |
| 2 | 2 | sp\|P52746\|ZN142_HUMAN | ZNF142 | 187.76 | 2.636 |
| 2 | 2 | sp\|Q96L73\|NSD1_HUMAN | NSD1 | 296.46 | 2.6321 |
| 2 | 2 | sp\|Q15149\|PLEC_HUMAN | PLEC | 531.47 | 2.6286 |
| 2 | 2 | sp\|P05023\|AT1A1_HUMAN | ATP1A1 | 112.82 | 2.5941 |
| 2 | 2 | sp\|P26373\|RL13_HUMAN | RPL13 | 24.25 | 2.5795 |
| 2 | 2 | sp\|P52948\|NUP98_HUMAN | NUP98 | 197.46 | 2.5777 |
| 2 | 2 | sp\|Q9NW64\|RBM22_HUMAN | RBM22 | 46.87 | 2.521 |
| 2 | 2 | sp\|O14979\|HNRDL_HUMAN | HNRNPDL | 46.41 | 2.5206 |
| 2 | 2 | sp\|Q96HS1\|PGAM5_HUMAN | PGAM5 | 31.98 | 2.5018 |
| 2 | 2 | sp\|P62249\|RS16_HUMAN | RPS16 | 16.44 | 2.3822 |
| 2 | 2 | sp\|Q14966\|ZN638_HUMAN | ZNF638 | 220.49 | 2.3648 |
| 2 | 2 | sp\|Q9NRG9\|AAAS_HUMAN | AAAS | 59.54 | 2.3486 |
| 2 | 2 | sp\|Q86U38\|NOP9_HUMAN | NOP9 | 69.39 | 2.3397 |
| 2 | 2 | sp\|P25311\|ZA2G_HUMAN | AZGP1 | 34.24 | 2.2809 |
| 2 | 2 | sp\|Q13895\|BYST_HUMAN | BYSL | 49.57 | 2.2751 |
| 1 | 2 | sp\|Q01130\|SRSF2_HUMAN | SRSF2 | 25.46 | 5.126 |
| 1 | 2 | tr\|A0A0M3HER2\|A0A0M3HER2_HUMAN | CENPV | 18.8 | 4.1321 |
| 1 | 2 | sp\|O75151\|PHF2_HUMAN | PHF2 | 120.7 | 3.6742 |
| 1 | 2 | sp\|O75323\|NIPS2_HUMAN | NIPSNAP2 | 33.72 | 2.0829 |
| 1 | 1 | sp\|P08708\|RS17_HUMAN | RPS17 | 15.54 | 5.521 |
| 1 | 1 | sp\|P08865\|RSSA_HUMAN | RPSA | 32.83 | 5.1704 |
| 1 | 1 | sp\|P07355\|ANXA2_HUMAN | ANXA2 | 38.58 | 5.1093 |
| 1 | 1 | sp\|Q6PK04\|CC137_HUMAN | CCDC137 | 33.21 | 5.0221 |
| 1 | 1 | sp\|O94906\|PRP6_HUMAN | PRPF6 | 106.86 | 4.9042 |
| 1 | 1 | sp\|Q3ZCQ8\|TIM50_HUMAN | TIMM50 | 39.62 | 4.8852 |
| 1 | 1 | tr\|A8K7N0\|A8K7N0_HUMAN | | 23.63 | 4.8498 |
| 1 | 1 | tr\|A0A0A0MQS2\|A0A0A0MQS2_HUMAN | CLASRP | 77.12 | 4.7872 |
| 1 | 1 | sp\|Q9NQZ2\|SAS10_HUMAN | UTP3 | 54.53 | 4.7178 |
| 1 | 1 | sp\|Q13243\|SRSF5_HUMAN | SRSF5 | 31.25 | 4.7078 |
| 1 | 1 | sp\|Q96MU7\|YTDC1_HUMAN | YTHDC1 | 84.65 | 4.7045 |
| 1 | 1 | tr\|Q6IPH7\|Q6IPH7_HUMAN | RPL14 | 23.77 | 4.6788 |
| 1 | 1 | tr\|S4R341\|S4R341_HUMAN | NOLC1 | 8.05 | 4.663 |
| 1 | 1 | sp\|O43159\|RRP8_HUMAN | RRP8 | 50.68 | 4.6332 |
| 1 | 1 | sp\|P50914\|RL14_HUMAN | RPL14 | 23.42 | 4.618 |
| 1 | 1 | sp\|Q9GZL7\|WDR12_HUMAN | WDR12 | 47.68 | 4.5869 |
| 1 | 1 | sp\|Q9GZR2\|REXO4_HUMAN | REXO4 | 46.64 | 4.5713 |
| 1 | 1 | sp\|Q8NAF0\|ZN579_HUMAN | ZNF579 | 60.47 | 4.5123 |
| 1 | 1 | sp\|P62913\|RL11_HUMAN | RPL11 | 20.24 | 4.4569 |
| 1 | 1 | sp\|P16989\|YBOX3_HUMAN | YBX3 | 40.07 | 4.4487 |
| 1 | 1 | sp\|Q75QN2\|INT8_HUMAN | INTS8 | 113.02 | 4.428 |
| 1 | 1 | sp\|Q13263\|TIF1B_HUMAN | TRIM28 | 88.49 | 4.4118 |
| 1 | 1 | sp\|Q8WYB5\|KAT6B_HUMAN | KAT6B | 231.23 | 4.3886 |
| 1 | 1 | tr\|Q9UL78\|Q9UL78_HUMAN | | 11.64 | 4.3545 |
| 1 | 1 | sp\|O94880\|PHF14_HUMAN | PHF14 | 99.99 | 4.3129 |
| 1 | 1 | sp\|Q7Z4V5\|HDGR2_HUMAN | HDGFL2 | 74.27 | 4.3001 |
| 1 | 1 | sp\|Q13867\|BLMH_HUMAN | BLMH | 52.53 | 4.268 |
| 1 | 1 | sp\|Q86Y91\|KI18B_HUMAN | KIF18B | 94.16 | 4.2378 |
| 1 | 1 | sp\|Q32P51\|RA1L2_HUMAN | HNRNPA1L2 | 34.2 | 4.2125 |
| 1 | 1 | sp\|P55081\|MFAP1_HUMAN | MFAP1 | 51.93 | 4.1959 |
| 1 | 1 | sp\|Q96SK2\|TM209_HUMAN | TMEM209 | 62.88 | 4.194 |
| 1 | 1 | sp\|P62829\|RL23_HUMAN | RPL23 | 14.86 | 4.1813 |
| 1 | 1 | sp\|Q9NQ39\|RS10L_HUMAN | RPS10P5 | 20.11 | 4.1778 |
| 1 | 1 | tr\|B2RWN5\|B2RWN5_HUMAN | HEATR1 | 242.11 | 4.1764 |
| 1 | 1 | sp\|Q9HCM4\|E41L5_HUMAN | EPB41L5 | 81.8 | 4.1232 |
| 1 | 1 | sp\|P26599\|PTBP1_HUMAN | PTBP1 | 57.19 | 4.1098 |
| 1 | 1 | sp\|Q96EY7\|PTCD3_HUMAN | PTCD3 | 78.5 | 4.0773 |
| 1 | 1 | sp\|P20226\|TBP_HUMAN | TBP | 37.67 | 4.068 |
| 1 | 1 | tr\|B7Z8Y3\|B7Z8Y3_HUMAN | | 106.95 | 4.036 |
| 1 | 1 | sp\|P35658\|NU214_HUMAN | NUP214 | 213.49 | 4.017 |
| 1 | 1 | sp\|Q9UGM3\|DMBT1_HUMAN | DMBT1 | 260.57 | 4.0093 |
| 1 | 1 | sp\|Q9BW27\|NUP85_HUMAN | NUP85 | 74.97 | 4.0026 |
| 1 | 1 | sp\|O15381\|NVL_HUMAN | NVL | 94.99 | 3.9636 |
| 1 | 1 | sp\|Q14974\|IMB1_HUMAN | KPNB1 | 97.11 | 3.9488 |
| 1 | 1 | sp\|P0DMV9\|HS71B_HUMAN | HSPA1B | 70.01 | 3.9319 |
| 1 | 1 | sp\|Q76FK4\|NOL8_HUMAN | NOL8 | 131.54 | 3.9233 |
| 1 | 1 | sp\|O60508\|PRP17_HUMAN | CDC40 | 65.48 | 3.9111 |
| 1 | 1 | sp\|P09234\|RU1C_HUMAN | SNRPC | 17.38 | 3.8968 |
| 1 | 1 | sp\|Q9NRZ9\|HELLS_HUMAN | HELLS | 97.01 | 3.8903 |
| 1 | 1 | sp\|Q9Y3A2\|UTP11_HUMAN | UTP11 | 30.43 | 3.8848 |
| 1 | 1 | sp\|Q13415\|ORC1_HUMAN | ORC1 | 97.29 | 3.8764 |
| 1 | 1 | sp\|Q69YH5\|CDCA2_HUMAN | CDCA2 | 112.61 | 3.8703 |
| 1 | 1 | sp\|Q6IQ32\|ADNP2_HUMAN | ADNP2 | 122.75 | 3.8567 |
| 1 | 1 | sp\|O43795\|MYO1B_HUMAN | MYO1B | 131.9 | 3.833 |
| 1 | 1 | sp\|Q9P035\|HACD3_HUMAN | HACD3 | 43.13 | 3.8266 |
| 1 | 1 | sp\|Q9BYN8\|RT26_HUMAN | MRPS26 | 24.2 | 3.8217 |
| 1 | 1 | sp\|P07437\|TBB5_HUMAN | TUBB | 49.64 | 3.818 |
| 1 | 1 | sp\|O15042\|SR140_HUMAN | U2SURP | 118.22 | 3.8052 |
| 1 | 1 | sp\|Q01831\|XPC_HUMAN | XPC | 105.89 | 3.8043 |
| 1 | 1 | tr\|B0UZZ8\|B0UZZ8_HUMAN | C6orf11 | 68 | 3.7793 |
| 1 | 1 | sp\|P13929\|ENOB_HUMAN | ENO3 | 46.96 | 3.7735 |
| 1 | 1 | sp\|Q9BWN1\|PRR14_HUMAN | PRR14 | 64.29 | 3.7614 |
| 1 | 1 | sp\|Q9UIS9\|MBD1_HUMAN | MBD1 | 66.56 | 3.7254 |
| 1 | 1 | sp\|Q9BYD2\|RM09_HUMAN | MRPL9 | 30.22 | 3.7014 |
| 1 | 1 | sp\|Q9NPI1\|BRD7_HUMAN | BRD7 | 74.09 | 3.6873 |
| 1 | 1 | sp\|Q9BYD3\|RM04_HUMAN | MRPL4 | 34.9 | 3.6809 |
| 1 | 1 | sp\|P42696\|RBM34_HUMAN | RBM34 | 48.54 | 3.6619 |
| 1 | 1 | sp\|Q13206\|DDX10_HUMAN | DDX10 | 100.83 | 3.6542 |
| 1 | 1 | sp\|Q07021\|C1QBP_HUMAN | C1QBP | 31.34 | 3.6263 |
| 1 | 1 | sp\|Q8WVC0\|LEO1_HUMAN | LEO1 | 75.36 | 3.6184 |
| 1 | 1 | sp\|Q69YN4\|VIR_HUMAN | KIAA1429 | 201.9 | 3.6178 |
| 1 | 1 | sp\|P12277\|KCRB_HUMAN | CKB | 42.62 | 3.5894 |
| 1 | 1 | sp\|Q9Y3B9\|RRP15_HUMAN | RRP15 | 31.46 | 3.5847 |
| 1 | 1 | sp\|O43251\|RFOX2_HUMAN | RBFOX2 | 41.35 | 3.5765 |
| 1 | 1 | sp\|Q8N1G0\|ZN687_HUMAN | ZNF687 | 129.45 | 3.5753 |
| 1 | 1 | sp\|Q14669\|TRIPC_HUMAN | TRIP12 | 220.3 | 3.5724 |
| 1 | 1 | sp\|P10523\|ARRS_HUMAN | SAG | 45.09 | 3.563 |
| 1 | 1 | sp\|Q9HAF1\|EAF6_HUMAN | MEAF6 | 21.62 | 3.5254 |
| 1 | 1 | sp\|P01834\|IGKC_HUMAN | IGKC | 11.76 | 3.5209 |
| 1 | 1 | sp\|Q5T280\|CI114_HUMAN | SPOUT1 | 41.98 | 3.519 |
| 1 | 1 | sp\|P38646\|GRP75_HUMAN | HSPA9 | 73.63 | 3.5173 |
| 1 | 1 | sp\|Q9H6R0\|DHX33_HUMAN | DHX33 | 78.82 | 3.5069 |
| 1 | 1 | sp\|O00571\|DDX3X_HUMAN | DDX3X | 73.2 | 3.5066 |
| 1 | 1 | sp\|Q06587\|RING1_HUMAN | RING1 | 42.4 | 3.4787 |
| 1 | 1 | sp\|Q13151\|ROA0_HUMAN | HNRNPA0 | 30.82 | 3.4486 |
| 1 | 1 | sp\|O75934\|SPF27_HUMAN | BCAS2 | 26.11 | 3.4476 |
| 1 | 1 | sp\|Q9UBB5\|MBD2_HUMAN | MBD2 | 43.23 | 3.4443 |
| 1 | 1 | sp\|Q9NX63\|MIC19_HUMAN | CHCHD3 | 26.14 | 3.4382 |
| 1 | 1 | tr\|Q05CW7\|Q05CW7_HUMAN | NAT10 | 62.35 | 3.3784 |
| 1 | 1 | sp\|P49759\|CLK1_HUMAN | CLK1 | 57.25 | 3.3643 |
| 1 | 1 | sp\|Q58FF8\|H90B2_HUMAN | HSP90AB2P | 44.32 | 3.358 |
| 1 | 1 | sp\|P62258\|1433E_HUMAN | YWHAE | 29.16 | 3.3441 |
| 1 | 1 | sp\|Q15365\|PCBP1_HUMAN | PCBP1 | 37.47 | 3.3429 |
| 1 | 1 | sp\|Q13148\|TADBP_HUMAN | TARDBP | 44.71 | 3.3393 |
| 1 | 1 | sp\|P62847\|RS24_HUMAN | RPS24 | 15.41 | 3.2951 |
| 1 | 1 | sp\|P41219\|PERI_HUMAN | PRPH | 53.62 | 3.2937 |
| 1 | 1 | sp\|O00148\|DX39A_HUMAN | DDX39A | 49.1 | 3.2936 |
| 1 | 1 | sp\|P12236\|ADT3_HUMAN | SLC25A6 | 32.85 | 3.2759 |
| 1 | 1 | sp\|Q8NHW5\|RLA0L_HUMAN | RPLP0P6 | 34.34 | 3.2647 |
| 1 | 1 | sp\|O60832\|DKC1_HUMAN | DKC1 | 57.64 | 3.2545 |
| 1 | 1 | sp\|Q13129\|RLF_HUMAN | RLF | 217.81 | 3.2327 |
| 1 | 1 | sp\|Q02241\|KIF23_HUMAN | KIF23 | 109.99 | 3.2283 |
| 1 | 1 | sp\|P26368\|U2AF2_HUMAN | U2AF2 | 53.47 | 3.2053 |
| 1 | 1 | sp\|Q9ULW3\|ABT1_HUMAN | ABT1 | 31.06 | 3.2034 |
| 1 | 1 | KV2A7_MOUSE | | 12.27 | 3.1941 |
| 1 | 1 | sp\|P21333\|FLNA_HUMAN | FLNA | 280.56 | 3.1928 |
| 1 | 1 | sp\|Q8TF76\|HASP_HUMAN | GSG2 | 88.44 | 3.1876 |
| 1 | 1 | sp\|Q92665\|RT31_HUMAN | MRPS31 | 45.29 | 3.1529 |
| 1 | 1 | sp\|P04843\|RPN1_HUMAN | RPN1 | 68.53 | 3.1371 |
| 1 | 1 | sp\|O75223\|GGCT_HUMAN | GGCT | 20.99 | 3.1294 |
| 1 | 1 | sp\|P40939\|ECHA_HUMAN | HADHA | 82.95 | 3.0859 |
| 1 | 1 | sp\|E9PRG8\|CK098_HUMAN | C11orf98 | 13.79 | 3.0795 |
| 1 | 1 | sp\|Q9BXF3\|CECR2_HUMAN | CECR2 | 164.11 | 3.075 |
| 1 | 1 | sp\|Q8IXM6\|NRM_HUMAN | NRM | 29.36 | 3.0489 |
| 1 | 1 | sp\|O94901\|SUN1_HUMAN | SUN1 | 90.01 | 3.041 |
| 1 | 1 | sp\|P01876\|IGHA1_HUMAN | IGHA1 | 37.63 | 3.0351 |
| 1 | 1 | tr\|A0A024R383\|A0A024R383_HUMAN | hCG_21098 | 172.58 | 3.0327 |
| 1 | 1 | sp\|O94805\|ACL6B_HUMAN | ACTL6B | 46.85 | 3.0307 |
| 1 | 1 | sp\|Q96EP5\|DAZP1_HUMAN | DAZAP1 | 43.36 | 3.0232 |
| 1 | 1 | tr\|Q53F64\|Q53F64_HUMAN | | 35.97 | 3.005 |
| 1 | 1 | sp\|P0DOX7\|IGK_HUMAN | | 23.36 | 2.9832 |
| 1 | 1 | sp\|P34931\|HS71L_HUMAN | HSPA1L | 70.33 | 2.971 |
| 1 | 1 | sp\|Q7Z5J4\|RAI1_HUMAN | RAI1 | 203.23 | 2.9686 |
| 1 | 1 | sp\|Q9Y6A4\|CFA20_HUMAN | CFAP20 | 22.76 | 2.9642 |
| 1 | 1 | sp\|P43246\|MSH2_HUMAN | MSH2 | 104.68 | 2.9358 |
| 1 | 1 | sp\|Q9NQ50\|RM40_HUMAN | MRPL40 | 24.48 | 2.9286 |
| 1 | 1 | sp\|Q8TEM1\|PO210_HUMAN | NUP210 | 204.98 | 2.9195 |
| 1 | 1 | sp\|Q09161\|NCBP1_HUMAN | NCBP1 | 91.78 | 2.9158 |
| 1 | 1 | sp\|Q13242\|SRSF9_HUMAN | SRSF9 | 25.53 | 2.9054 |
| 1 | 1 | sp\|Q9Y2R9\|RT07_HUMAN | MRPS7 | 28.12 | 2.8919 |
| 1 | 1 | sp\|Q9NY12\|GAR1_HUMAN | GAR1 | 22.33 | 2.8874 |
| 1 | 1 | sp\|Q9UQ88\|CD11A_HUMAN | CDK11A | 91.31 | 2.8526 |
| 1 | 1 | sp\|Q8N6I1\|EID2_HUMAN | EID2 | 25.17 | 2.8514 |
| 1 | 1 | sp\|Q9UNL2\|SSRG_HUMAN | SSR3 | 21.07 | 2.8211 |
| 1 | 1 | sp\|O75530\|EED_HUMAN | EED | 50.17 | 2.8165 |
| 1 | 1 | sp\|P47914\|RL29_HUMAN | RPL29 | 17.74 | 2.801 |
| 1 | 1 | sp\|Q12830\|BPTF_HUMAN | BPTF | 338.05 | 2.7991 |
| 1 | 1 | sp\|Q8IWT3\|CUL9_HUMAN | CUL9 | 281.05 | 2.7852 |
| 1 | 1 | sp\|O95232\|LC7L3_HUMAN | LUC7L3 | 51.44 | 2.7789 |
| 1 | 1 | sp\|P0DMR1\|HNRC4_HUMAN | HNRNPCL4 | 32.01 | 2.7683 |
| 1 | 1 | sp\|Q5T3J3\|LRIF1_HUMAN | LRIF1 | 84.52 | 2.7663 |
| 1 | 1 | sp\|P01857\|IGHG1_HUMAN | IGHG1 | 36.08 | 2.7607 |
| 1 | 1 | sp\|P51571\|SSRD_HUMAN | SSR4 | 18.99 | 2.7559 |
| 1 | 1 | sp\|P46783\|RS10_HUMAN | RPS10 | 18.89 | 2.7434 |
| 1 | 1 | sp\|Q01469\|FABP5_HUMAN | FABP5 | 15.15 | 2.6709 |
| 1 | 1 | sp\|O60506\|HNRPQ_HUMAN | SYNCRIP | 69.56 | 2.6267 |
| 1 | 1 | sp\|P68871\|HBB_HUMAN | HBB | 15.99 | 2.6157 |
| 1 | 1 | sp\|Q5H9F3\|BCORL_HUMAN | BCORL1 | 182.41 | 2.6122 |
| 1 | 1 | sp\|Q9Y232\|CDYL1_HUMAN | CDYL | 66.44 | 2.6118 |
| 1 | 1 | sp\|Q09028\|RBBP4_HUMAN | RBBP4 | 47.63 | 2.6044 |
| 1 | 1 | sp\|Q01844\|EWS_HUMAN | EWSR1 | 68.44 | 2.603 |
| 1 | 1 | sp\|Q9NWU5\|RM22_HUMAN | MRPL22 | 23.63 | 2.5935 |
| 1 | 1 | sp\|A8MTJ3\|GNAT3_HUMAN | GNAT3 | 40.33 | 2.5839 |
| 1 | 1 | sp\|O14647\|CHD2_HUMAN | CHD2 | 211.21 | 2.5688 |
| 1 | 1 | sp\|P56134\|ATPK_HUMAN | ATP5J2 | 10.91 | 2.5572 |
| 1 | 1 | sp\|Q9HBE1\|PATZ1_HUMAN | PATZ1 | 74.01 | 2.5483 |
| 1 | 1 | sp\|Q6DRA6\|H2B2D_HUMAN | HIST2H2BD | 18.01 | 2.5415 |
| 1 | 1 | sp\|P54652\|HSP72_HUMAN | HSPA2 | 69.98 | 2.5309 |
| 1 | 1 | sp\|Q9UKD2\|MRT4_HUMAN | MRTO4 | 27.54 | 2.5209 |
| 1 | 1 | sp\|Q8N201\|INT1_HUMAN | INTS1 | 244.14 | 2.5195 |
| 1 | 1 | sp\|Q5SRE5\|NU188_HUMAN | NUP188 | 195.92 | 2.4771 |
| 1 | 1 | sp\|Q9Y4F1\|FARP1_HUMAN | FARP1 | 118.56 | 2.4621 |
| 1 | 1 | sp\|P17010\|ZFX_HUMAN | ZFX | 90.46 | 2.439 |
| 1 | 1 | sp\|Q7Z2K6\|ERMP1_HUMAN | ERMP1 | 100.17 | 2.4223 |
| 1 | 1 | sp\|Q9UJZ1\|STML2_HUMAN | STOML2 | 38.51 | 2.4195 |
| 1 | 1 | sp\|P62269\|RS18_HUMAN | RPS18 | 17.71 | 2.417 |
| 1 | 1 | sp\|Q16352\|AINX_HUMAN | INA | 55.36 | 2.4143 |
| 1 | 1 | sp\|Q9BRL6\|SRSF8_HUMAN | SRSF8 | 32.27 | 2.3771 |
| 1 | 1 | sp\|Q9HC84\|MUC5B_HUMAN | MUC5B | 595.96 | 2.3769 |
| 1 | 1 | sp\|P11488\|GNAT1_HUMAN | GNAT1 | 40.02 | 2.3735 |
| 1 | 1 | sp\|Q9HCD5\|NCOA5_HUMAN | NCOA5 | 65.5 | 2.3666 |
| 1 | 1 | sp\|P43304\|GPDM_HUMAN | GPD2 | 80.8 | 2.3647 |
| 1 | 1 | sp\|Q15388\|TOM20_HUMAN | TOMM20 | 16.29 | 2.3634 |
| 1 | 1 | sp\|P61353\|RL27_HUMAN | RPL27 | 15.79 | 2.3498 |
| 1 | 1 | sp\|Q9BXY5\|CAYP2_HUMAN | CAPS2 | 63.8 | 2.3229 |
| 1 | 1 | sp\|Q9BZE1\|RM37_HUMAN | MRPL37 | 48.09 | 2.288 |
| 1 | 1 | sp\|Q9P2K5\|MYEF2_HUMAN | MYEF2 | 64.08 | 2.2862 |
| 1 | 1 | tr\|A0A024R5M9\|A0A024R5M9_HUMAN | NUMA1 | 236.37 | 2.2646 |
| 1 | 1 | sp\|Q06830\|PRDX1_HUMAN | PRDX1 | 22.1 | 2.2423 |
| 1 | 1 | sp\|Q9UI42\|CBPA4_HUMAN | CPA4 | 47.32 | 2.2271 |
| 1 | 1 | sp\|O75152\|ZC11A_HUMAN | ZC3H11A | 89.08 | 2.2039 |
| 1 | 1 | sp\|Q9NVX2\|NLE1_HUMAN | NLE1 | 53.29 | 2.1771 |
| 1 | 1 | sp\|Q14156\|EFR3A_HUMAN | EFR3A | 92.86 | 2.1643 |
| 1 | 1 | sp\|P22314\|UBA1_HUMAN | UBA1 | 117.77 | 2.1283 |

TABLE 5D
HA-SS18WT_NE_peptides

| Unique | Total | reference | Gene Symbol | MWT(kDa) | AVG |
|---|---|---|---|---|---|
| 55 | 595 | sp\|P51532\|SMCA4_HUMAN | SMARCA4 | 184.53 | 3.203 |
| 86 | 536 | sp\|P51531\|SMCA2_HUMAN | SMARCA2 | 181.17 | 3.0037 |
| 105 | 448 | sp\|O14497\|ARI1A_HUMAN | ARID1A | 241.89 | 3.1848 |
| 56 | 414 | sp\|Q92922\|SMRC1_HUMAN | SMARCC1 | 122.79 | 2.9463 |
| 69 | 368 | sp\|Q8TAQ2\|SMRC2_HUMAN | SMARCC2 | 132.8 | 2.9867 |
| 95 | 307 | sp\|Q8NFD5\|ARI1B_HUMAN | ARID1B | 235.97 | 2.9764 |
| 45 | 158 | sp\|Q9NZM4\|BICRA_HUMAN | BICRA | 158.39 | 3.144 |
| 29 | 157 | sp\|O96019\|ACL6A_HUMAN | ACTL6A | 47.43 | 3.1706 |
| 32 | 144 | sp\|Q96GM5\|SMRD1_HUMAN | SMARCD1 | 58.2 | 3.2163 |
| 31 | 137 | sp\|Q6STE5\|SMRD3_HUMAN | SMARCD3 | 54.98 | 3.1622 |
| 34 | 120 | sp\|Q969G3\|SMCE1_HUMAN | SMARCE1 | 46.62 | 3.2044 |
| 13 | 115 | sp\|P62736\|ACTA_HUMAN | ACTA2 | 41.98 | 2.6075 |
| 23 | 109 | sp\|Q12824\|SNF5_HUMAN | SMARCB1 | 44.11 | 3.0533 |
| 83 | 98 | sp\|P78527\|PRKDC_HUMAN | PRKDC | 468.79 | 3.3759 |
| 9 | 93 | sp\|P63261\|ACTG_HUMAN | ACTG1 | 41.77 | 3.302 |
| 29 | 89 | sp\|Q92925\|SMRD2_HUMAN | SMARCD2 | 58.88 | 3.204 |
| 13 | 70 | sp\|Q4VC05\|BCL7A_HUMAN | BCL7A | 22.8 | 3.2931 |
| 33 | 69 | sp\|Q9H8M2\|BRD9_HUMAN | BRD9 | 66.96 | 3.3574 |
| 21 | 48 | sp\|P49411\|EFTU_HUMAN | TUFM | 49.51 | 2.863 |
| 17 | 46 | sp\|Q92785\|REQU_HUMAN | DPF2 | 44.13 | 3.6127 |
| 26 | 42 | sp\|P25705\|ATPA_HUMAN | ATP5A1 | 59.71 | 3.5053 |
| 13 | 41 | sp\|P12236\|ADT3_HUMAN | SLC25A6 | 32.85 | 2.6018 |
| 35 | 36 | sp\|P35580\|MYH10_HUMAN | MYH10 | 228.86 | 3.6421 |
| 34 | 34 | sp\|O75643\|U520_HUMAN | SNRNP200 | 244.35 | 3.2978 |
| 28 | 33 | sp\|P06576\|ATPB_HUMAN | ATP5B | 56.52 | 3.6358 |
| 11 | 33 | sp\|Q8WUZ0\|BCL7C_HUMAN | BCL7C | 23.45 | 3.2939 |
| 20 | 29 | sp\|P52272\|HNRPM_HUMAN | HNRNPM | 77.46 | 3.2563 |
| 16 | 29 | sp\|Q6AI39\|BICRL_HUMAN | BICRAL | 115.01 | 3.0716 |
| 25 | 27 | sp\|P35579\|MYH9_HUMAN | MYH9 | 226.39 | 4.1382 |
| 23 | 25 | sp\|Q08211\|DHX9_HUMAN | DHX9 | 140.87 | 3.6402 |
| 20 | 25 | sp\|P05023\|AT1A1_HUMAN | ATP1A1 | 112.82 | 3.7054 |
| 22 | 24 | sp\|Q9UJS0\|CMC2_HUMAN | SLC25A13 | 74.13 | 3.3988 |
| 13 | 24 | sp\|Q00325\|MPCP_HUMAN | SLC25A3 | 40.07 | 2.7509 |
| 18 | 23 | sp\|P68371\|TBB4B_HUMAN | TUBB4B | 49.8 | 3.6902 |
| 17 | 23 | sp\|O95831\|AIFM1_HUMAN | AIFM1 | 66.86 | 3.2073 |
| 21 | 21 | sp\|Q92621\|NU205_HUMAN | NUP205 | 227.78 | 3.3918 |
| 21 | 21 | sp\|Q6P2Q9\|PRP8_HUMAN | PRPF8 | 273.43 | 2.9541 |
| 15 | 20 | sp\|Q9NVI7\|ATD3A_HUMAN | ATAD3A | 71.32 | 3.2389 |
| 9 | 20 | sp\|P68104\|EF1A1_HUMAN | EEF1A1 | 50.11 | 3.3548 |
| 4 | 20 | tr\|B9EGQ8\|B9EGQ8_HUMAN | SMARCA4 | 189.33 | 3.7789 |
| 14 | 19 | sp\|P11021\|GRP78_HUMAN | HSPA5 | 72.29 | 3.312 |
| 18 | 18 | sp\|P52701\|MSH6_HUMAN | MSH6 | 152.69 | 3.2055 |
| 18 | 18 | sp\|Q8N1F7\|NUP93_HUMAN | NUP93 | 93.43 | 2.826 |
| 17 | 17 | sp\|Q10570\|CPSF1_HUMAN | CPSF1 | 160.78 | 3.3065 |
| 12 | 17 | sp\|P20700\|LMNB1_HUMAN | LMNB1 | 66.37 | 3.3674 |
| 14 | 16 | sp\|P38646\|GRP75_HUMAN | HSPA9 | 73.63 | 3.5339 |
| 15 | 15 | sp\|Q15029\|U5S1_HUMAN | EFTUD2 | 109.37 | 3.4816 |
| 15 | 15 | sp\|Q14204\|DYHC1_HUMAN | DYNC1H1 | 532.07 | 3.4659 |
| 15 | 15 | sp\|Q7L0Y3\|MRRP1_HUMAN | TRMT10C | 47.32 | 3.2489 |
| 15 | 15 | sp\|Q9BQG0\|MBB1A_HUMAN | MYBBP1A | 148.76 | 2.8622 |
| 13 | 15 | sp\|Q16891\|MIC60_HUMAN | IMMT | 83.63 | 3.7338 |
| 12 | 15 | sp\|P16615\|AT2A2_HUMAN | ATP2A2 | 114.68 | 2.973 |
| 14 | 14 | sp\|P04844\|RPN2_HUMAN | RPN2 | 69.24 | 3.8313 |
| 14 | 14 | sp\|Q14980\|NUMA1_HUMAN | NUMA1 | 238.12 | 3.6168 |
| 13 | 14 | sp\|Q9BQE3\|TBA1C_HUMAN | TUBA1C | 49.86 | 3.2879 |
| 2 | 14 | sp\|Q15532\|SSXT_HUMAN | SS18 | 45.9 | 2.6617 |
| 13 | 13 | sp\|Q02978\|M2OM_HUMAN | SLC25A11 | 34.04 | 3.6267 |
| 12 | 13 | sp\|P30837\|AL1B1_HUMAN | ALDH1B1 | 57.17 | 3.9563 |
| 12 | 13 | sp\|P42704\|LPPRC_HUMAN | LRPPRC | 157.81 | 3.2168 |
| 11 | 13 | sp\|P22087\|FBRL_HUMAN | FBL | 33.76 | 3.2519 |
| 12 | 12 | sp\|Q96A33\|CCD47_HUMAN | CCDC47 | 55.84 | 3.6465 |
| 12 | 12 | sp\|P10809\|CH60_HUMAN | HSPD1 | 61.02 | 3.3748 |
| 11 | 12 | sp\|P40939\|ECHA_HUMAN | HADHA | 82.95 | 3.7455 |
| 11 | 12 | sp\|P43243\|MATR3_HUMAN | MATR3 | 94.56 | 3.2881 |
| 8 | 12 | sp\|P36542\|ATPG_HUMAN | ATP5C1 | 32.98 | 2.4526 |
| 5 | 12 | sp\|Q9BQE9\|BCL7B_HUMAN | BCL7B | 22.18 | 2.6066 |
| 11 | 11 | sp\|O75746\|CMC1_HUMAN | SLC25A12 | 74.71 | 3.7205 |
| 11 | 11 | sp\|P04181\|OAT_HUMAN | OAT | 48.5 | 3.6399 |
| 11 | 11 | sp\|Q9Y4W6\|AFG32_HUMAN | AFG3L2 | 88.53 | 3.6226 |
| 11 | 11 | sp\|O75306\|NDUS2_HUMAN | NDUFS2 | 52.51 | 3.5563 |
| 11 | 11 | sp\|O43795\|MYO1B_HUMAN | MYO1B | 131.9 | 3.3594 |
| 11 | 11 | sp\|Q9BUQ8\|DDX23_HUMAN | DDX23 | 95.52 | 3.0862 |
| 10 | 11 | sp\|P21796\|VDAC1_HUMAN | VDAC1 | 30.75 | 3.361 |
| 10 | 11 | sp\|Q53H12\|AGK_HUMAN | AGK | 47.11 | 3.1775 |
| 9 | 11 | sp\|Q6UN15\|FIP1_HUMAN | FIP1L1 | 66.49 | 3.5179 |
| 9 | 11 | sp\|Q9H9B4\|SFXN1_HUMAN | SFXN1 | 35.6 | 3.4442 |
| 10 | 10 | sp\|O00567\|NOP56_HUMAN | NOP56 | 66.01 | 3.7799 |
| 10 | 10 | sp\|Q6NUK1\|SCMC1_HUMAN | SLC25A24 | 53.32 | 3.4896 |
| 10 | 10 | sp\|O94832\|MYO1D_HUMAN | MYO1D | 116.13 | 3.1152 |
| 10 | 10 | sp\|Q12769\|NU160_HUMAN | NUP160 | 162.02 | 3.0307 |
| 9 | 10 | sp\|Q53GQ0\|DHB12_HUMAN | HSD17B12 | 34.3 | 3.7669 |
| 9 | 10 | sp\|Q9Y5B6\|PAXB1_HUMAN | PAXBP1 | 104.74 | 3.6482 |
| 9 | 10 | sp\|P11310\|ACADM_HUMAN | ACADM | 46.56 | 3.5587 |
| 9 | 10 | sp\|Q9C0J8\|WDR33_HUMAN | WDR33 | 145.8 | 3.513 |
| 9 | 10 | sp\|Q96I99\|SUCB2_HUMAN | SUCLG2 | 46.48 | 3.1081 |
| 8 | 10 | sp\|P11177\|ODPB_HUMAN | PDHB | 39.21 | 3.3188 |
| 5 | 10 | IGH1M_MOUSE | Ighg1 | 43.36 | 2.8688 |
| 5 | 10 | sp\|P53985\|MOT1_HUMAN | SLC16A1 | 53.91 | 2.6482 |
| 9 | 9 | sp\|Q9H857\|NT5D2_HUMAN | NT5DC2 | 60.68 | 3.0761 |
| 9 | 9 | sp\|Q5SRE5\|NU188_HUMAN | NUP188 | 195.92 | 2.5925 |
| 8 | 9 | sp\|Q92616\|GCN1_HUMAN | GCN1 | 292.57 | 3.5758 |
| 8 | 9 | sp\|Q9UBB9\|TFP11_HUMAN | TFIP11 | 96.76 | 2.5113 |
| 7 | 9 | sp\|Q9P035\|HACD3_HUMAN | HACD3 | 43.13 | 3.1073 |
| 5 | 9 | sp\|Q5T280\|CI114_HUMAN | SPOUT1 | 41.98 | 3.3565 |
| 8 | 8 | sp\|O00159\|MYO1C_HUMAN | MYO1C | 121.61 | 4.128 |
| 8 | 8 | sp\|O75489\|NDUS3_HUMAN | NDUFS3 | 30.22 | 3.6044 |
| 8 | 8 | sp\|Q8NI60\|COQ8A_HUMAN | COQ8A | 71.9 | 3.597 |
| 8 | 8 | sp\|Q969V3\|NCLN_HUMAN | NCLN | 62.93 | 3.2065 |
| 8 | 8 | sp\|P33993\|MCM7_HUMAN | MCM7 | 81.26 | 3.0851 |
| 8 | 8 | sp\|Q9UJV9\|DDX41_HUMAN | DDX41 | 69.79 | 2.6071 |
| 7 | 8 | sp\|P11142\|HSP7C_HUMAN | HSPA8 | 70.85 | 3.9598 |
| 7 | 8 | sp\|O14980\|XPO1_HUMAN | XPO1 | 123.31 | 3.6204 |
| 7 | 8 | sp\|P39656\|OST48_HUMAN | DDOST | 50.77 | 3.2075 |
| 7 | 8 | sp\|O60313\|OPA1_HUMAN | OPA1 | 111.56 | 2.9217 |
| 7 | 8 | sp\|Q8N8A6\|DDX51_HUMAN | DDX51 | 72.41 | 2.8323 |
| 6 | 8 | sp\|P22695\|QCR2_HUMAN | UQCRC2 | 48.41 | 3.6726 |
| 3 | 8 | sp\|P05141\|ADT2_HUMAN | SLC25A5 | 32.83 | 3.2983 |
| 7 | 7 | sp\|Q9Y2X3\|NOP58_HUMAN | NOP58 | 59.54 | 3.9978 |
| 7 | 7 | sp\|P43246\|MSH2_HUMAN | MSH2 | 104.68 | 3.7982 |
| 7 | 7 | sp\|Q9Y2R4\|DDX52_HUMAN | DDX52 | 67.46 | 3.695 |
| 7 | 7 | sp\|Q16822\|PCKGM_HUMAN | PCK2 | 70.68 | 3.5129 |
| 7 | 7 | sp\|A0FGR8\|ESYT2_HUMAN | ESYT2 | 102.29 | 3.375 |
| 7 | 7 | sp\|O14983\|AT2A1_HUMAN | ATP2A1 | 110.18 | 3.3628 |
| 7 | 7 | sp\|Q29RF7\|PDS5A_HUMAN | PDS5A | 150.73 | 3.3405 |
| 7 | 7 | sp\|Q96T37\|RBM15_HUMAN | RBM15 | 107.12 | 3.1355 |
| 7 | 7 | sp\|Q9P2I0\|CPSF2_HUMAN | CPSF2 | 88.43 | 2.6885 |
| 7 | 7 | sp\|P53007\|TXTP_HUMAN | SLC25A1 | 33.99 | 2.3894 |
| 6 | 7 | sp\|O00411\|RPOM_HUMAN | POLRMT | 138.53 | 4.0187 |
| 6 | 7 | sp\|Q3ZCQ8\|TIM50_HUMAN | TIMM50 | 39.62 | 3.4954 |
| 6 | 7 | sp\|P50213\|IDH3A_HUMAN | IDH3A | 39.57 | 2.9987 |
| 6 | 7 | sp\|Q92841\|DDX17_HUMAN | DDX17 | 80.22 | 2.8887 |
| 6 | 7 | sp\|Q14739\|LBR_HUMAN | LBR | 70.66 | 2.7688 |
| 6 | 6 | sp\|Q96TA2\|YMEL1_HUMAN | YME1L1 | 86.4 | 4.3425 |
| 6 | 6 | sp\|Q8TED0\|UTP15_HUMAN | UTP15 | 58.38 | 3.7408 |
| 6 | 6 | sp\|P13674\|P4HA1_HUMAN | P4HA1 | 61.01 | 3.6475 |
| 6 | 6 | sp\|Q3SY69\|AL1L2_HUMAN | ALDH1L2 | 101.68 | 3.5282 |
| 6 | 6 | sp\|P26368\|U2AF2_HUMAN | U2AF2 | 53.47 | 3.4804 |
| 6 | 6 | tr\|F8VXC8\|F8VXC8_HUMAN | SMARCC2 | 136.1 | 3.4048 |
| 6 | 6 | sp\|P45954\|ACDSB_HUMAN | ACADSB | 47.46 | 3.1749 |
| 6 | 6 | sp\|P34931\|HS71L_HUMAN | HSPA1L | 70.33 | 3.111 |
| 6 | 6 | sp\|P26641\|EF1G_HUMAN | EEF1G | 50.09 | 3.109 |
| 6 | 6 | sp\|Q9NUL7\|DDX28_HUMAN | DDX28 | 59.54 | 3.0823 |
| 6 | 6 | sp\|P55084\|ECHB_HUMAN | HADHB | 51.26 | 3.0592 |
| 6 | 6 | sp\|P35251\|RFC1_HUMAN | RFC1 | 128.18 | 3.0236 |
| 6 | 6 | sp\|Q9BPW8\|NIPS1_HUMAN | NIPSNAP1 | 33.29 | 2.9544 |
| 6 | 6 | sp\|Q9NXE4\|NSMA3_HUMAN | SMPD4 | 93.29 | 2.9319 |
| 6 | 6 | sp\|O43615\|TIM44_HUMAN | TIMM44 | 51.32 | 2.8937 |
| 6 | 6 | sp\|P50416\|CPT1A_HUMAN | CPT1A | 88.31 | 2.7685 |
| 5 | 6 | sp\|O43175\|SERA_HUMAN | PHGDH | 56.61 | 3.9221 |
| 5 | 6 | sp\|Q8NDT2\|RB15B_HUMAN | RBM15B | 97.15 | 3.6373 |
| 5 | 6 | sp\|Q15758\|AAAT_HUMAN | SLC1A5 | 56.56 | 3.3323 |
| 5 | 6 | sp\|P53597\|SUCA_HUMAN | SUCLG1 | 36.23 | 3.2971 |
| 5 | 6 | sp\|P50570\|DYN2_HUMAN | DNM2 | 98 | 3.1087 |
| 4 | 6 | sp\|Q92784\|DPF3_HUMAN | DPF3 | 43.06 | 4.3143 |
| 4 | 6 | sp\|P51571\|SSRD_HUMAN | SSR4 | 18.99 | 2.9063 |
| 5 | 5 | sp\|Q68CP9\|ARID2_HUMAN | ARID2 | 197.27 | 3.8774 |
| 5 | 5 | sp\|Q5UIP0\|RIF1_HUMAN | RIF1 | 274.29 | 3.8562 |
| 5 | 5 | sp\|O14828\|SCAM3_HUMAN | SCAMP3 | 38.26 | 3.8314 |
| 5 | 5 | sp\|A1L0T0\|ILVBL_HUMAN | ILVBL | 67.82 | 3.7405 |
| 5 | 5 | sp\|P47985\|UCRI_HUMAN | UQCRFS1 | 29.65 | 3.6437 |
| 5 | 5 | sp\|Q03701\|CEBPZ_HUMAN | CEBPZ | 120.9 | 3.564 |
| 5 | 5 | sp\|P45880\|VDAC2_HUMAN | VDAC2 | 31.55 | 3.5043 |
| 5 | 5 | sp\|Q9BW27\|NUP85_HUMAN | NUP85 | 74.97 | 3.4294 |
| 5 | 5 | sp\|P53621\|COPA_HUMAN | COPA | 138.26 | 3.3088 |
| 5 | 5 | sp\|Q9UDR5\|AASS_HUMAN | AASS | 102.07 | 3.296 |
| 5 | 5 | sp\|P04843\|RPN1_HUMAN | RPN1 | 68.53 | 3.2012 |
| 5 | 5 | sp\|Q9BSD7\|NTPCR_HUMAN | NTPCR | 20.7 | 3.1848 |
| 5 | 5 | sp\|Q6JQN1\|ACD10_HUMAN | ACAD10 | 118.76 | 3.1462 |
| 5 | 5 | sp\|P08670\|VIME_HUMAN | VIM | 53.62 | 3.0791 |
| 5 | 5 | sp\|Q6P4A7\|SFXN4_HUMAN | SFXN4 | 37.97 | 2.9877 |
| 5 | 5 | sp\|Q9NTI5\|PDS5B_HUMAN | PDS5B | 164.56 | 2.9774 |
| 5 | 5 | sp\|P46977\|STT3A_HUMAN | STT3A | 80.48 | 2.9334 |
| 5 | 5 | sp\|Q96EY1\|DNJA3_HUMAN | DNAJA3 | 52.46 | 2.8714 |
| 5 | 5 | sp\|P00367\|DHE3_HUMAN | GLUD1 | 61.36 | 2.6644 |
| 5 | 5 | sp\|Q9NRK6\|ABCBA_HUMAN | ABCB10 | 79.1 | 2.6502 |
| 5 | 5 | sp\|Q9P2R7\|SUCB1_HUMAN | SUCLA2 | 50.29 | 2.0854 |
| 4 | 5 | sp\|Q9H9P8\|L2HDH_HUMAN | L2HGDH | 50.28 | 3.836 |
| 4 | 5 | sp\|Q15637\|SF01_HUMAN | SF1 | 68.29 | 3.8277 |
| 4 | 5 | sp\|P28331\|NDUS1_HUMAN | NDUFS1 | 79.42 | 3.6792 |
| 4 | 5 | sp\|Q9H7H0\|MET17_HUMAN | METTL17 | 50.7 | 3.5298 |
| 4 | 5 | sp\|Q9NPI1\|BRD7_HUMAN | BRD7 | 74.09 | 3.3321 |
| 4 | 5 | sp\|Q14974\|IMB1_HUMAN | KPNB1 | 97.11 | 3.287 |
| 4 | 5 | sp\|P53618\|COPB_HUMAN | COPB1 | 107.07 | 3.1059 |
| 4 | 5 | sp\|P07437\|TBB5_HUMAN | TUBB | 49.64 | 2.9809 |
| 4 | 5 | sp\|Q96CS3\|FAF2_HUMAN | FAF2 | 52.59 | 2.8438 |
| 4 | 4 | sp\|P13804\|ETFA_HUMAN | ETFA | 35.06 | 4.3735 |
| 4 | 4 | sp\|P52597\|HNRPF_HUMAN | HNRNPF | 45.64 | 4.2399 |
| 4 | 4 | sp\|Q96BW9\|TAM41_HUMAN | TAMM41 | 51.03 | 4.2029 |
| 4 | 4 | sp\|Q5T9A4\|ATD3B_HUMAN | ATAD3B | 72.53 | 3.9984 |
| 4 | 4 | sp\|Q9HC07\|TM165_HUMAN | TMEM165 | 34.88 | 3.9971 |
| 4 | 4 | sp\|Q9GZR7\|DDX24_HUMAN | DDX24 | 96.27 | 3.86 |
| 4 | 4 | sp\|Q92947\|GCDH_HUMAN | GCDH | 48.1 | 3.8323 |
| 4 | 4 | sp\|P55795\|HNRH2_HUMAN | HNRNPH2 | 49.23 | 3.6838 |
| 4 | 4 | sp\|Q92576\|PHF3_HUMAN | PHF3 | 229.34 | 3.6333 |
| 4 | 4 | sp\|Q9Y512\|SAM50_HUMAN | SAMM50 | 51.94 | 3.6212 |
| 4 | 4 | sp\|O43837\|IDH3B_HUMAN | IDH3B | 42.16 | 3.5936 |
| 4 | 4 | sp\|P0DMV9\|HS71B_HUMAN | HSPA1B | 70.01 | 3.5795 |
| 4 | 4 | sp\|O15269\|SPTC1_HUMAN | SPTLC1 | 52.71 | 3.5667 |
| 4 | 4 | sp\|P48047\|ATPO_HUMAN | ATP5O | 23.26 | 3.3792 |
| 4 | 4 | sp\|Q96NB2\|SFXN2_HUMAN | SFXN2 | 36.21 | 3.3362 |
| 4 | 4 | sp\|Q96EP5\|DAZP1_HUMAN | DAZAP1 | 43.36 | 3.3271 |
| 4 | 4 | sp\|P49590\|SYHM_HUMAN | HARS2 | 56.85 | 3.2496 |
| 4 | 4 | sp\|Q96D53\|COQ8B_HUMAN | COQ8B | 60.03 | 3.2252 |
| 4 | 4 | sp\|Q14978\|NOLC1_HUMAN | NOLC1 | 73.56 | 3.1412 |
| 4 | 4 | sp\|Q9NSE4\|SYIM_HUMAN | IARS2 | 113.72 | 3.0973 |
| 4 | 4 | sp\|P49756\|RBM25_HUMAN | RBM25 | 100.12 | 3.0237 |
| 4 | 4 | sp\|O75616\|ERAL1_HUMAN | ERAL1 | 48.32 | 2.8867 |
| 4 | 4 | sp\|P17844\|DDX5_HUMAN | DDX5 | 69.1 | 2.8479 |
| 4 | 4 | sp\|P55786\|PSA_HUMAN | NPEPPS | 103.21 | 2.8037 |
| 4 | 4 | sp\|P24539\|AT5F1_HUMAN | ATP5F1 | 28.89 | 2.7676 |
| 4 | 4 | sp\|Q12905\|ILF2_HUMAN | ILF2 | 43.04 | 2.7356 |
| 4 | 4 | sp\|O60762\|DPM1_HUMAN | DPM1 | 29.62 | 2.7256 |
| 4 | 4 | sp\|Q9Y305\|ACOT9_HUMAN | ACOT9 | 49.87 | 2.7236 |
| 4 | 4 | sp\|O60318\|GANP_HUMAN | MCM3AP | 218.27 | 2.6029 |
| 3 | 4 | sp\|P35250\|RFC2_HUMAN | RFC2 | 39.13 | 3.773 |
| 3 | 4 | sp\|O75027\|ABCB7_HUMAN | ABCB7 | 82.59 | 3.4147 |
| 3 | 4 | sp\|Q92782\|DPF1_HUMAN | DPF1 | 42.47 | 2.7282 |
| 3 | 4 | sp\|Q9UM00\|TMCO1_HUMAN | TMCO1 | 21.16 | 2.6108 |
| 3 | 4 | sp\|P46459\|NSF_HUMAN | NSF | 82.54 | 2.133 |
| 3 | 3 | sp\|O75400\|PR40A_HUMAN | PRPF40A | 108.74 | 4.5658 |
| 3 | 3 | sp\|Q14498\|RBM39_HUMAN | RBM39 | 59.34 | 4.3685 |
| 3 | 3 | sp\|O95299\|NDUAA_HUMAN | NDUFA10 | 40.72 | 4.3305 |
| 3 | 3 | sp\|Q9NX63\|MIC19_HUMAN | CHCHD3 | 26.14 | 4.2124 |
| 3 | 3 | sp\|O94906\|PRP6_HUMAN | PRPF6 | 106.86 | 4.1852 |
| 3 | 3 | sp\|A6NJ78\|MET15_HUMAN | METTL15 | 46.09 | 4.1633 |
| 3 | 3 | sp\|Q9H583\|HEAT1_HUMAN | HEATR1 | 242.22 | 4.1273 |
| 3 | 3 | sp\|O00165\|HAX1_HUMAN | HAX1 | 31.6 | 4.0022 |
| 3 | 3 | sp\|Q9H845\|ACAD9_HUMAN | ACAD9 | 68.72 | 3.9765 |
| 3 | 3 | sp\|P48735\|IDHP_HUMAN | IDH2 | 50.88 | 3.946 |
| 3 | 3 | sp\|Q00839\|HNRPU_HUMAN | HNRNPU | 90.53 | 3.9089 |
| 3 | 3 | sp\|Q9BW92\|SYTM_HUMAN | TARS2 | 80.99 | 3.8276 |
| 3 | 3 | sp\|Q96SK2\|TM209_HUMAN | TMEM209 | 62.88 | 3.826 |
| 3 | 3 | sp\|Q9HCM4\|E41L5_HUMAN | EPB41L5 | 81.8 | 3.7752 |
| 3 | 3 | sp\|Q8IY17\|PLPL6_HUMAN | PNPLA6 | 149.9 | 3.7737 |
| 3 | 3 | sp\|P35249\|RFC4_HUMAN | RFC4 | 39.66 | 3.7582 |
| 3 | 3 | sp\|Q9UQ90\|SPG7_HUMAN | SPG7 | 88.18 | 3.7499 |
| 3 | 3 | sp\|Q9Y5M8\|SRPRB_HUMAN | SRPRB | 29.68 | 3.7264 |
| 3 | 3 | sp\|Q14103\|HNRPD_HUMAN | HNRNPD | 38.41 | 3.6717 |
| 3 | 3 | sp\|P38432\|COIL_HUMAN | COIL | 62.57 | 3.6706 |
| 3 | 3 | sp\|Q15120\|PDK3_HUMAN | PDK3 | 46.91 | 3.629 |
| 3 | 3 | sp\|P19105\|ML12A_HUMAN | MYL12A | 19.78 | 3.6243 |
| 3 | 3 | sp\|Q6IAN0\|DRS7B_HUMAN | DHRS7B | 35.1 | 3.6008 |
| 3 | 3 | sp\|P28288\|ABCD3_HUMAN | ABCD3 | 75.43 | 3.5716 |
| 3 | 3 | sp\|P31689\|DNJA1_HUMAN | DNAJA1 | 44.84 | 3.5604 |
| 3 | 3 | sp\|Q49A26\|GLYR1_HUMAN | GLYR1 | 60.52 | 3.5595 |
| 3 | 3 | sp\|Q9H0A0\|NAT10_HUMAN | NAT10 | 115.66 | 3.5176 |
| 3 | 3 | sp\|Q9UKM7\|MA1B1_HUMAN | MAN1B1 | 79.53 | 3.4936 |
| 3 | 3 | sp\|P24468\|COT2_HUMAN | NR2F2 | 45.54 | 3.4642 |
| 3 | 3 | sp\|O75600\|KBL_HUMAN | GCAT | 45.26 | 3.4574 |
| 3 | 3 | sp\|P18074\|ERCC2_HUMAN | ERCC2 | 86.85 | 3.446 |
| 3 | 3 | sp\|O75533\|SF3B1_HUMAN | SF3B1 | 145.74 | 3.3905 |
| 3 | 3 | sp\|Q68CQ7\|GL8D1_HUMAN | GLT8D1 | 41.91 | 3.3887 |
| 3 | 3 | sp\|P50402\|EMD_HUMAN | EMD | 28.98 | 3.3781 |
| 3 | 3 | sp\|O94813\|SLIT2_HUMAN | SLIT2 | 169.76 | 3.3702 |
| 3 | 3 | sp\|Q12931\|TRAP1_HUMAN | TRAP1 | 80.06 | 3.3555 |
| 3 | 3 | sp\|Q8N201\|INT1_HUMAN | INTS1 | 244.14 | 3.3539 |
| 3 | 3 | sp\|Q9NVI1\|FANCI_HUMAN | FANCI | 149.23 | 3.3187 |
| 3 | 3 | sp\|Q9UM54\|MYO6_HUMAN | MYO6 | 149.6 | 3.2785 |
| 3 | 3 | sp\|Q5JTZ9\|SYAM_HUMAN | AARS2 | 107.27 | 3.2518 |
| 3 | 3 | sp\|O15270\|SPTC2_HUMAN | SPTLC2 | 62.88 | 3.2179 |
| 3 | 3 | sp\|P43307\|SSRA_HUMAN | SSR1 | 32.22 | 3.2065 |
| 3 | 3 | sp\|Q5T160\|SYRM_HUMAN | RARS2 | 65.46 | 3.2025 |
| 3 | 3 | sp\|Q9H936\|GHC1_HUMAN | SLC25A22 | 34.45 | 3.1966 |
| 3 | 3 | sp\|P33527\|MRP1_HUMAN | ABCC1 | 171.48 | 3.1945 |
| 3 | 3 | sp\|P31943\|HNRH1_HUMAN | HNRNPH1 | 49.2 | 3.1369 |
| 3 | 3 | sp\|P32189\|GLPK_HUMAN | GK | 61.21 | 3.1141 |
| 3 | 3 | sp\|Q92542\|NICA_HUMAN | NCSTN | 78.36 | 3.0897 |
| 3 | 3 | sp\|O94874\|UFL1_HUMAN | UFL1 | 89.54 | 3.0748 |
| 3 | 3 | sp\|O00400\|ACATN_HUMAN | SLC33A1 | 60.87 | 3.047 |
| 3 | 3 | sp\|Q07021\|C1QBP_HUMAN | C1QBP | 31.34 | 3.0334 |
| 3 | 3 | sp\|O76031\|CLPX_HUMAN | CLPX | 69.18 | 3.0094 |
| 3 | 3 | sp\|Q9NZ01\|TECR_HUMAN | TECR | 36.01 | 2.9946 |
| 3 | 3 | sp\|Q9BWM7\|SFXN3_HUMAN | SFXN3 | 35.48 | 2.993 |
| 3 | 3 | sp\|O43913\|ORC5_HUMAN | ORC5 | 50.25 | 2.9825 |
| 3 | 3 | sp\|Q92945\|FUBP2_HUMAN | KHSRP | 73.07 | 2.977 |
| 3 | 3 | sp\|P12235\|ADT1_HUMAN | SLC25A4 | 33.04 | 2.958 |
| 3 | 3 | sp\|Q9H2S9\|IKZF4_HUMAN | IKZF4 | 64.07 | 2.9251 |
| 3 | 3 | sp\|O43824\|GTPB6_HUMAN | GTPBP6 | 56.85 | 2.9127 |
| 3 | 3 | sp\|O43809\|CPSF5_HUMAN | NUDT21 | 26.21 | 2.8367 |
| 3 | 3 | sp\|Q5SY16\|NOL9_HUMAN | NOL9 | 79.27 | 2.8134 |
| 3 | 3 | sp\|Q9NXF1\|TEX10_HUMAN | TEX10 | 105.61 | 2.7769 |
| 3 | 3 | sp\|Q9BX10\|GTPB2_HUMAN | GTPBP2 | 65.73 | 2.7706 |
| 3 | 3 | sp\|P60660\|MYL6_HUMAN | MYL6 | 16.92 | 2.7542 |
| 3 | 3 | sp\|P09874\|PARP1_HUMAN | PARP1 | 113.01 | 2.7471 |
| 3 | 3 | sp\|Q16795\|NDUA9_HUMAN | NDUFA9 | 42.48 | 2.7254 |
| 3 | 3 | sp\|Q86UT6\|NLRX1_HUMAN | NLRX1 | 107.55 | 2.6517 |
| 3 | 3 | sp\|Q9Y678\|COPG1_HUMAN | COPG1 | 97.66 | 2.637 |
| 3 | 3 | sp\|Q15393\|SF3B3_HUMAN | SF3B3 | 135.49 | 2.5952 |
| 3 | 3 | sp\|Q14684\|RRP1B_HUMAN | RRP1B | 84.38 | 2.5659 |
| 3 | 3 | sp\|P23258\|TBG1_HUMAN | TUBG1 | 51.14 | 2.4401 |
| 3 | 3 | sp\|Q96PK6\|RBM14_HUMAN | RBM14 | 69.45 | 2.1696 |
| 2 | 3 | sp\|P56192\|SYMC_HUMAN | MARS | 101.05 | 3.3287 |
| 2 | 3 | sp\|Q8TCT9\|HM13_HUMAN | HM13 | 41.46 | 3.0227 |
| 2 | 3 | sp\|P40938\|RFC3_HUMAN | RFC3 | 40.53 | 2.7393 |
| 2 | 2 | sp\|Q9NS69\|TOM22_HUMAN | TOMM22 | 15.51 | 4.8805 |
| 2 | 2 | sp\|Q9NVH1\|DJC11_HUMAN | DNAJC11 | 63.24 | 4.8216 |
| 2 | 2 | sp\|Q8IY37\|DHX37_HUMAN | DHX37 | 129.46 | 4.5684 |
| 2 | 2 | sp\|P07910\|HNRPC_HUMAN | HNRNPC | 33.65 | 4.5425 |
| 2 | 2 | sp\|Q8TB37\|NUBPL_HUMAN | NUBPL | 34.06 | 4.5419 |
| 2 | 2 | sp\|P23634\|AT2B4_HUMAN | ATP2B4 | 137.83 | 4.4613 |
| 2 | 2 | sp\|Q99805\|TM9S2_HUMAN | TM9SF2 | 75.73 | 4.4071 |
| 2 | 2 | sp\|O95674\|CDS2_HUMAN | CDS2 | 51.38 | 4.4009 |
| 2 | 2 | sp\|Q6DD88\|ATLA3_HUMAN | ATL3 | 60.5 | 4.3202 |
| 2 | 2 | sp\|Q8N465\|D2HDH_HUMAN | D2HGDH | 56.38 | 4.2164 |
| 2 | 2 | sp\|Q8NF37\|PCAT1_HUMAN | LPCAT1 | 59.11 | 4.138 |
| 2 | 2 | sp\|O95470\|SGPL1_HUMAN | SGPL1 | 63.48 | 4.1063 |
| 2 | 2 | sp\|Q96C36\|P5CR2_HUMAN | PYCR2 | 33.62 | 4.0071 |
| 2 | 2 | sp\|P31040\|SDHA_HUMAN | SDHA | 72.65 | 3.9895 |
| 2 | 2 | sp\|Q5JTV8\|TOIP1_HUMAN | TOR1AIP1 | 66.21 | 3.8342 |
| 2 | 2 | sp\|P52292\|IMA1_HUMAN | KPNA2 | 57.83 | 3.7956 |
| 2 | 2 | sp\|Q5JU69\|TOR2A_HUMAN | TOR2A | 35.69 | 3.7897 |
| 2 | 2 | sp\|P61247\|RS3A_HUMAN | RPS3A | 29.93 | 3.7885 |
| 2 | 2 | sp\|Q9BVA1\|TBB2B_HUMAN | TUBB2B | 49.92 | 3.7692 |
| 2 | 2 | sp\|Q01650\|LAT1_HUMAN | SLC7A5 | 54.97 | 3.7618 |
| 2 | 2 | sp\|Q99623\|PHB2_HUMAN | PHB2 | 33.28 | 3.7184 |
| 2 | 2 | sp\|P61225\|RAP2B_HUMAN | RAP2B | 20.49 | 3.709 |
| 2 | 2 | sp\|Q9UDX5\|MTFP1_HUMAN | MTFP1 | 18 | 3.6947 |
| 2 | 2 | sp\|Q13435\|SF3B2_HUMAN | SF3B2 | 100.16 | 3.6764 |
| 2 | 2 | sp\|O14654\|IRS4_HUMAN | IRS4 | 133.68 | 3.6741 |
| 2 | 2 | sp\|O43143\|DHX15_HUMAN | DHX15 | 90.88 | 3.6482 |
| 2 | 2 | sp\|P51648\|AL3A2_HUMAN | ALDH3A2 | 54.81 | 3.6364 |
| 2 | 2 | sp\|Q8NHH9\|ATLA2_HUMAN | ATL2 | 66.19 | 3.6352 |
| 2 | 2 | sp\|P49821\|NDUV1_HUMAN | NDUFV1 | 50.78 | 3.6288 |
| 2 | 2 | sp\|A3KMH1\|VWA8_HUMAN | VWA8 | 214.69 | 3.5989 |
| 2 | 2 | sp\|P35613\|BASI_HUMAN | BSG | 42.17 | 3.5353 |
| 2 | 2 | sp\|O60264\|SMCA5_HUMAN | SMARCA5 | 121.83 | 3.5339 |
| 2 | 2 | sp\|Q9UBX3\|DIC_HUMAN | SLC25A10 | 31.26 | 3.5314 |
| 2 | 2 | sp\|Q9UBM7\|DHCR7_HUMAN | DHCR7 | 54.45 | 3.5297 |
| 2 | 2 | sp\|Q96GC9\|VMP1_HUMAN | VMP1 | 46.21 | 3.5212 |
| 2 | 2 | sp\|Q9UJZ1\|STML2_HUMAN | STOML2 | 38.51 | 3.4846 |
| 2 | 2 | sp\|P08195\|4F2_HUMAN | SLC3A2 | 67.95 | 3.4622 |
| 2 | 2 | sp\|Q8IXI1\|MIRO2_HUMAN | RHOT2 | 68.07 | 3.4496 |
| 2 | 2 | sp\|Q92544\|TM9S4_HUMAN | TM9SF4 | 74.47 | 3.4436 |
| 2 | 2 | sp\|Q9H061\|T126A_HUMAN | TMEM126A | 21.51 | 3.4371 |
| 2 | 2 | sp\|P62987\|RL40_HUMAN | UBA52 | 14.72 | 3.3766 |
| 2 | 2 | sp\|P56134\|ATPK_HUMAN | ATP5J2 | 10.91 | 3.3667 |
| 2 | 2 | sp\|Q14966\|ZN638_HUMAN | ZNF638 | 220.49 | 3.3667 |
| 2 | 2 | sp\|Q96KK5\|H2A1H_HUMAN | HIST1H2AH | 13.9 | 3.3625 |
| 2 | 2 | sp\|P57088\|TMM33_HUMAN | TMEM33 | 27.96 | 3.3465 |
| 2 | 2 | sp\|P42167\|LAP2B_HUMAN | TMPO | 50.64 | 3.3447 |
| 2 | 2 | sp\|P49755\|TMEDA_HUMAN | TMED10 | 24.96 | 3.3296 |
| 2 | 2 | sp\|O00257\|CBX4_HUMAN | CBX4 | 61.33 | 3.3272 |
| 2 | 2 | sp\|P49792\|RBP2_HUMAN | RANBP2 | 357.97 | 3.3175 |
| 2 | 2 | sp\|P42285\|SK2L2_HUMAN | SKIV2L2 | 117.73 | 3.3157 |
| 2 | 2 | sp\|Q9NRZ9\|HELLS_HUMAN | HELLS | 97.01 | 3.3123 |
| 2 | 2 | sp\|O75251\|NDUS7_HUMAN | NDUFS7 | 23.55 | 3.3089 |
| 2 | 2 | sp\|Q86U86\|PB1_HUMAN | PBRM1 | 192.83 | 3.3065 |
| 2 | 2 | sp\|Q8WYP5\|ELYS_HUMAN | AHCTF1 | 252.34 | 3.2824 |
| 2 | 2 | sp\|Q9Y5J1\|UTP18_HUMAN | UTP18 | 61.96 | 3.2445 |
| 2 | 2 | sp\|Q5TA45\|INT11_HUMAN | INTS11 | 67.62 | 3.2252 |
| 2 | 2 | sp\|Q8IZL8\|PELP1_HUMAN | PELP1 | 119.62 | 3.2022 |
| 2 | 2 | sp\|P19404\|NDUV2_HUMAN | NDUFV2 | 27.37 | 3.2008 |
| 2 | 2 | sp\|Q9H0U3\|MAGT1_HUMAN | MAGT1 | 38.01 | 3.1984 |
| 2 | 2 | sp\|P33778\|H2B1B_HUMAN | HIST1H2BB | 13.94 | 3.1968 |
| 2 | 2 | sp\|Q9P0J0\|NDUAD_HUMAN | NDUFA13 | 16.69 | 3.1856 |
| 2 | 2 | sp\|Q9UNQ2\|DIM1_HUMAN | DIMT1 | 35.21 | 3.1738 |
| 2 | 2 | sp\|Q9BTV4\|TMM43_HUMAN | TMEM43 | 44.85 | 3.1711 |
| 2 | 2 | sp\|Q9NUQ2\|PLCE_HUMAN | AGPAT5 | 42.04 | 3.1429 |
| 2 | 2 | sp\|Q00587\|BORG5_HUMAN | CDC42EP1 | 40.27 | 3.1195 |
| 2 | 2 | sp\|P61619\|S61A1_HUMAN | SEC61A1 | 52.23 | 3.0941 |
| 2 | 2 | sp\|Q9BVP2\|GNL3_HUMAN | GNL3 | 61.95 | 3.0916 |
| 2 | 2 | sp\|Q9ULK4\|MED23_HUMAN | MED23 | 156.37 | 3.0903 |
| 2 | 2 | sp\|Q9NVH0\|EXD2_HUMAN | EXD2 | 70.31 | 3.0877 |
| 2 | 2 | sp\|P51553\|IDH3G_HUMAN | IDH3G | 42.77 | 3.0735 |
| 2 | 2 | sp\|Q8IXI2\|MIRO1_HUMAN | RHOT1 | 70.74 | 3.0472 |
| 2 | 2 | sp\|P54652\|HSP72_HUMAN | HSPA2 | 69.98 | 2.9928 |
| 2 | 2 | sp\|Q969X6\|UTP4_HUMAN | UTP4 | 76.84 | 2.9848 |
| 2 | 2 | sp\|O95573\|ACSL3_HUMAN | ACSL3 | 80.37 | 2.972 |
| 2 | 2 | sp\|P05412\|JUN_HUMAN | JUN | 35.65 | 2.9631 |
| 2 | 2 | sp\|Q9Y2X9\|ZN281_HUMAN | ZNF281 | 96.85 | 2.8979 |
| 2 | 2 | sp\|Q9NNW5\|WDR6_HUMAN | WDR6 | 121.65 | 2.8824 |
| 2 | 2 | sp\|Q13505\|MTX1_HUMAN | MTX1 | 51.44 | 2.8361 |
| 2 | 2 | sp\|Q13123\|RED_HUMAN | IK | 65.56 | 2.8316 |
| 2 | 2 | sp\|Q9NR30\|DDX21_HUMAN | DDX21 | 87.29 | 2.794 |
| 2 | 2 | sp\|Q9H8H2\|DDX31_HUMAN | DDX31 | 94.03 | 2.7931 |
| 2 | 2 | sp\|Q5JVF3\|PCID2_HUMAN | PCID2 | 46 | 2.7734 |
| 2 | 2 | sp\|Q9H300\|PARL_HUMAN | PARL | 42.16 | 2.7484 |
| 2 | 2 | sp\|Q8N684\|CPSF7_HUMAN | CPSF7 | 52.02 | 2.7454 |
| 2 | 2 | sp\|Q9NRG9\|AAAS_HUMAN | AAAS | 59.54 | 2.738 |
| 2 | 2 | sp\|O43347\|MSI1H_HUMAN | MSI1 | 39.1 | 2.7273 |
| 2 | 2 | sp\|O94805\|ACL6B_HUMAN | ACTL6B | 46.85 | 2.7223 |
| 2 | 2 | sp\|P30825\|CTR1_HUMAN | SLC7A1 | 67.59 | 2.6943 |
| 2 | 2 | sp\|Q9P032\|NDUF4_HUMAN | NDUFAF4 | 20.25 | 2.6784 |
| 2 | 2 | sp\|Q10469\|MGAT2_HUMAN | MGAT2 | 51.52 | 2.6709 |
| 2 | 2 | sp\|P38117\|ETFB_HUMAN | ETFB | 27.83 | 2.6625 |
| 2 | 2 | sp\|Q9H2V7\|SPNS1_HUMAN | SPNS1 | 56.59 | 2.6569 |
| 2 | 2 | sp\|Q9HD45\|TM9S3_HUMAN | TM9SF3 | 67.84 | 2.6083 |
| 2 | 2 | sp\|Q96HS1\|PGAM5_HUMAN | PGAM5 | 31.98 | 2.5617 |
| 2 | 2 | sp\|P11166\|GTR1_HUMAN | SLC2A1 | 54.05 | 2.5583 |
| 2 | 2 | sp\|Q9NVP1\|DDX18_HUMAN | DDX18 | 75.36 | 2.4152 |
| 2 | 2 | sp\|P40937\|RFC5_HUMAN | RFC5 | 38.47 | 2.3758 |
| 2 | 2 | sp\|Q92643\|GPI8_HUMAN | PIGK | 45.22 | 2.3695 |
| 2 | 2 | sp\|Q7L3T8\|SYPM_HUMAN | PARS2 | 53.23 | 2.3537 |
| 2 | 2 | sp\|Q96AA3\|RFT1_HUMAN | RFT1 | 60.3 | 2.3164 |
| 2 | 2 | sp\|P12081\|SYHC_HUMAN | HARS | 57.37 | 2.3032 |
| 2 | 2 | sp\|Q8TDD1\|DDX54_HUMAN | DDX54 | 98.53 | 2.3024 |
| 2 | 2 | sp\|Q86TJ2\|TAD2B_HUMAN | TADA2B | 48.44 | 2.2102 |
| 2 | 2 | sp\|Q6PI48\|SYDM_HUMAN | DARS2 | 73.52 | 2.2029 |
| 2 | 2 | sp\|P62851\|RS25_HUMAN | RPS25 | 13.73 | 2.0777 |
| 2 | 2 | sp\|Q9HC21\|TPC_HUMAN | SLC25A19 | 35.49 | 1.7524 |
| 1 | 2 | sp\|A8CG34\|P121C_HUMAN | POM121C | 124.98 | 5.0358 |
| 1 | 2 | sp\|Q15388\|TOM20_HUMAN | TOMM20 | 16.29 | 4.3863 |
| 1 | 2 | sp\|Q01844\|EWS_HUMAN | EWSR1 | 68.44 | 4.2847 |
| 1 | 2 | tr\|C8C3P2\|C8C3P2_HUMAN | DPF1 | 45.07 | 4.2698 |
| 1 | 2 | sp\|Q01130\|SRSF2_HUMAN | SRSF2 | 25.46 | 3.8434 |
| 1 | 2 | sp\|Q9BYX7\|ACTBM_HUMAN | POTEKP | 41.99 | 3.5392 |
| 1 | 2 | sp\|P41252\|SYIC_HUMAN | IARS | 144.41 | 2.8477 |
| 1 | 2 | sp\|Q569K6\|CC157_HUMAN | CCDC157 | 83.89 | 2.5838 |
| 1 | 2 | sp\|Q7Z2K6\|ERMP1_HUMAN | ERMP1 | 100.17 | 2.5131 |
| 1 | 2 | sp\|Q7RTS9\|DYM_HUMAN | DYM | 75.89 | 2.1052 |
| 1 | 1 | sp\|Q92804\|RBP56_HUMAN | TAF15 | 61.79 | 6.3231 |
| 1 | 1 | tr\|B7ZAF6\|B7ZAF6_HUMAN | SUCLA2 | 43.83 | 5.7056 |
| 1 | 1 | sp\|P39210\|MPV17_HUMAN | MPV17 | 19.72 | 5.6581 |
| 1 | 1 | sp\|Q9NXW2\|DJB12_HUMAN | DNAJB12 | 41.79 | 5.557 |
| 1 | 1 | sp\|Q8IXB1\|DJC10_HUMAN | DNAJC10 | 91.02 | 5.3514 |
| 1 | 1 | sp\|Q9Y3D7\|TIM16_HUMAN | PAM16 | 13.82 | 5.3043 |
| 1 | 1 | sp\|O75431\|MTX2_HUMAN | MTX2 | 29.74 | 5.2556 |
| 1 | 1 | tr\|H7BXI1\|H7BXI1_HUMAN | ESYT2 | 97.95 | 5.0949 |
| 1 | 1 | sp\|Q7L2E3\|DHX30_HUMAN | DHX30 | 133.85 | 5.0651 |
| 1 | 1 | sp\|O60306\|AQR_HUMAN | AQR | 171.19 | 5.0401 |
| 1 | 1 | sp\|Q9NU22\|MDN1_HUMAN | MDN1 | 632.42 | 5.0035 |
| 1 | 1 | tr\|S4R341\|S4R341_HUMAN | NOLC1 | 8.05 | 4.9157 |
| 1 | 1 | sp\|Q8NE86\|MCU_HUMAN | MCU | 39.84 | 4.8613 |
| 1 | 1 | sp\|P62314\|SMD1_HUMAN | SNRPD1 | 13.27 | 4.8513 |
| 1 | 1 | sp\|Q7L8L6\|FAKD5_HUMAN | FASTKD5 | 86.52 | 4.8453 |
| 1 | 1 | sp\|Q9UH99\|SUN2_HUMAN | SUN2 | 80.26 | 4.8348 |
| 1 | 1 | tr\|B2R5W2\|B2R5W2_HUMAN | HNRNPC | 31.93 | 4.8315 |
| 1 | 1 | sp\|Q7LGA3\|HS2ST_HUMAN | HS2ST1 | 41.85 | 4.7987 |
| 1 | 1 | sp\|Q9H0H0\|INT2_HUMAN | INTS2 | 134.24 | 4.7963 |
| 1 | 1 | sp\|Q9Y3T9\|NOC2L_HUMAN | NOC2L | 84.87 | 4.7054 |
| 1 | 1 | tr\|F8W7T1\|F8W7T1_HUMAN | DPF3 | 46.42 | 4.6927 |
| 1 | 1 | sp\|Q9Y679\|AUP1_HUMAN | AUP1 | 52.99 | 4.6866 |
| 1 | 1 | sp\|P12004\|PCNA_HUMAN | PCNA | 28.75 | 4.6666 |
| 1 | 1 | sp\|P38435\|VKGC_HUMAN | GGCX | 87.5 | 4.6623 |
| 1 | 1 | sp\|O75529\|TAF5L_HUMAN | TAF5L | 66.11 | 4.6056 |
| 1 | 1 | sp\|Q8WY36\|BBX_HUMAN | BBX | 105.06 | 4.5974 |
| 1 | 1 | sp\|O14925\|TIM23_HUMAN | TIMM23 | 21.93 | 4.5899 |
| 1 | 1 | sp\|Q6NSZ9\|ZSC25_HUMAN | ZSCAN25 | 61.44 | 4.5825 |
| 1 | 1 | sp\|Q13601\|KRR1_HUMAN | KRR1 | 43.64 | 4.5489 |
| 1 | 1 | sp\|Q9BXW9\|FACD2_HUMAN | FANCD2 | 164.02 | 4.517 |
| 1 | 1 | sp\|Q9Y2Q3\|GSTK1_HUMAN | GSTK1 | 25.48 | 4.509 |
| 1 | 1 | sp\|P09622\|DLDH_HUMAN | DLD | 54.14 | 4.4997 |
| 1 | 1 | sp\|P62136\|PP1A_HUMAN | PPP1CA | 37.49 | 4.4917 |
| 1 | 1 | sp\|Q5C9Z4\|NOM1_HUMAN | NOM1 | 96.2 | 4.4584 |
| 1 | 1 | sp\|Q5HYI7\|MTX3_HUMAN | MTX3 | 35.07 | 4.4263 |
| 1 | 1 | sp\|P55265\|DSRAD_HUMAN | ADAR | 135.98 | 4.4253 |
| 1 | 1 | sp\|P17812\|PYRG1_HUMAN | CTPS1 | 66.65 | 4.4181 |
| 1 | 1 | sp\|Q8NBN7\|RDH13_HUMAN | RDH13 | 35.91 | 4.4096 |
| 1 | 1 | sp\|P35232\|PHB_HUMAN | PHB | 29.79 | 4.3597 |
| 1 | 1 | sp\|Q9BT22\|ALG1_HUMAN | ALG1 | 52.48 | 4.3474 |
| 1 | 1 | sp\|Q9BQ67\|GRWD1_HUMAN | GRWD1 | 49.39 | 4.3332 |
| 1 | 1 | sp\|P35558\|PCKGC_HUMAN | PCK1 | 69.15 | 4.2123 |
| 1 | 1 | sp\|Q9UNL2\|SSRG_HUMAN | SSR3 | 21.07 | 4.1982 |
| 1 | 1 | sp\|O60884\|DNJA2_HUMAN | DNAJA2 | 45.72 | 4.1793 |
| 1 | 1 | sp\|Q9Y3A6\|TMED5_HUMAN | TMED5 | 25.99 | 4.1645 |
| 1 | 1 | sp\|P15880\|RS2_HUMAN | RPS2 | 31.3 | 4.1633 |
| 1 | 1 | sp\|Q9NVV4\|PAPD1_HUMAN | MTPAP | 66.13 | 4.1628 |
| 1 | 1 | sp\|Q96QD8\|S38A2_HUMAN | SLC38A2 | 55.99 | 4.1444 |
| 1 | 1 | sp\|Q92797\|SYMPK_HUMAN | SYMPK | 141.06 | 4.142 |
| 1 | 1 | sp\|Q75QN2\|INT8_HUMAN | INTS8 | 113.02 | 4.124 |
| 1 | 1 | sp\|O75528\|TADA3_HUMAN | TADA3 | 48.87 | 4.0685 |
| 1 | 1 | sp\|Q6NTF9\|RHBD2_HUMAN | RHBDD2 | 39.18 | 4.0674 |
| 1 | 1 | sp\|Q5JPH6\|SYEM_HUMAN | EARS2 | 58.65 | 4.0427 |
| 1 | 1 | sp\|Q8N0V3\|RBFA_HUMAN | RBFA | 38.34 | 4.0312 |
| 1 | 1 | sp\|Q9H5Q4\|TFB2M_HUMAN | TFB2M | 45.32 | 4.0306 |
| 1 | 1 | sp\|Q7Z7K6\|CENPV_HUMAN | CENPV | 29.93 | 4.0181 |
| 1 | 1 | sp\|P62995\|TRA2B_HUMAN | TRA2B | 33.65 | 4.0136 |
| 1 | 1 | sp\|P0CG08\|GPHRB_HUMAN | GPR89B | 52.88 | 3.9848 |
| 1 | 1 | sp\|Q9BYD2\|RM09_HUMAN | MRPL9 | 30.22 | 3.9633 |
| 1 | 1 | sp\|Q12788\|TBL3_HUMAN | TBL3 | 88.98 | 3.963 |
| 1 | 1 | sp\|Q8NAN2\|MIGA1_HUMAN | MIGA1 | 70.96 | 3.9529 |
| 1 | 1 | sp\|P57740\|NU107_HUMAN | NUP107 | 106.31 | 3.932 |
| 1 | 1 | sp\|O75439\|MPPB_HUMAN | PMPCB | 54.33 | 3.9211 |
| 1 | 1 | sp\|Q8IWA4\|MFN1_HUMAN | MFN1 | 84.05 | 3.906 |
| 1 | 1 | sp\|Q9UH62\|ARMX3_HUMAN | ARMCX3 | 42.47 | 3.8838 |
| 1 | 1 | sp\|O60830\|TI17B_HUMAN | TIMM17B | 18.26 | 3.8619 |
| 1 | 1 | sp\|Q8TBP6\|S2540_HUMAN | SLC25A40 | 38.1 | 3.8378 |
| 1 | 1 | sp\|Q86Y07\|VRK2_HUMAN | VRK2 | 58.1 | 3.8287 |
| 1 | 1 | sp\|Q96BN2\|TADA1_HUMAN | TADA1 | 37.36 | 3.7447 |
| 1 | 1 | sp\|Q9HDC5\|JPH1_HUMAN | JPH1 | 71.64 | 3.7388 |
| 1 | 1 | sp\|Q6NUN9\|ZN746_HUMAN | ZNF746 | 69.09 | 3.7249 |
| 1 | 1 | sp\|O14579\|COPE_HUMAN | COPE | 34.46 | 3.7075 |
| 1 | 1 | sp\|Q9Y2J2\|E41L3_HUMAN | EPB41L3 | 120.6 | 3.7065 |
| 1 | 1 | sp\|Q8N442\|GUF1_HUMAN | GUF1 | 74.28 | 3.7034 |
| 1 | 1 | sp\|P50454\|SERPH_HUMAN | SERPINH1 | 46.41 | 3.7024 |
| 1 | 1 | sp\|P52429\|DGKE_HUMAN | DGKE | 63.88 | 3.6861 |
| 1 | 1 | sp\|Q96H55\|MYO19_HUMAN | MYO19 | 109.07 | 3.6814 |
| 1 | 1 | sp\|Q9Y2G8\|DJC16_HUMAN | DNAJC16 | 90.53 | 3.6556 |
| 1 | 1 | sp\|Q9Y6J9\|TAF6L_HUMAN | TAF6L | 67.77 | 3.6543 |
| 1 | 1 | sp\|P48651\|PTSS1_HUMAN | PTDSS1 | 55.49 | 3.649 |
| 1 | 1 | sp\|Q08945\|SSRP1_HUMAN | SSRP1 | 81.02 | 3.6213 |
| 1 | 1 | sp\|Q9UBU9\|NXF1_HUMAN | NXF1 | 70.14 | 3.6188 |
| 1 | 1 | sp\|O43159\|RRP8_HUMAN | RRP8 | 50.68 | 3.6157 |
| 1 | 1 | sp\|Q9UMS4\|PRP19_HUMAN | PRPF19 | 55.15 | 3.6146 |
| 1 | 1 | sp\|Q8N6R0\|MET13_HUMAN | METTL13 | 78.72 | 3.5755 |
| 1 | 1 | sp\|Q8TAA9\|VANG1_HUMAN | VANGL1 | 59.94 | 3.5563 |
| 1 | 1 | sp\|O14776\|TCRG1_HUMAN | TCERG1 | 123.82 | 3.556 |
| 1 | 1 | sp\|Q14146\|URB2_HUMAN | URB2 | 170.43 | 3.5345 |
| 1 | 1 | sp\|Q9BVI4\|NOC4L_HUMAN | NOC4L | 58.43 | 3.5218 |
| 1 | 1 | sp\|P35637\|FUS_HUMAN | FUS | 53.39 | 3.4774 |
| 1 | 1 | sp\|P32322\|P5CR1_HUMAN | PYCR1 | 33.34 | 3.4646 |
| 1 | 1 | sp\|Q8N6L1\|KTAP2_HUMAN | KRTCAP2 | 14.67 | 3.4492 |
| 1 | 1 | IGKC_MOUSE | | 11.77 | 3.4442 |
| 1 | 1 | sp\|P37198\|NUP62_HUMAN | NUP62 | 53.22 | 3.4196 |
| 1 | 1 | sp\|Q96RQ1\|ERGI2_HUMAN | ERGIC2 | 42.52 | 3.4166 |
| 1 | 1 | sp\|P49711\|CTCF_HUMAN | CTCF | 82.73 | 3.3935 |
| 1 | 1 | sp\|Q02338\|BDH_HUMAN | BDH1 | 38.13 | 3.3731 |
| 1 | 1 | sp\|Q86VP6\|CAND1_HUMAN | CAND1 | 136.29 | 3.3721 |
| 1 | 1 | sp\|Q86U38\|NOP9_HUMAN | NOP9 | 69.39 | 3.3659 |
| 1 | 1 | sp\|O75352\|MPU1_HUMAN | MPDU1 | 26.62 | 3.3542 |
| 1 | 1 | sp\|Q8WWC4\|MAIP1_HUMAN | MAIP1 | 32.52 | 3.3373 |
| 1 | 1 | sp\|A4D1E9\|GTPBA_HUMAN | GTPBP10 | 42.91 | 3.3326 |
| 1 | 1 | sp\|P17858\|PFKAL_HUMAN | PFKL | 84.96 | 3.3144 |
| 1 | 1 | sp\|Q8WUY9\|DEP1B_HUMAN | DEPDC1B | 61.73 | 3.3118 |
| 1 | 1 | sp\|Q14318\|FKBP8_HUMAN | FKBP8 | 44.53 | 3.275 |
| 1 | 1 | sp\|P17987\|TCPA_HUMAN | TCP1 | 60.31 | 3.2565 |
| 1 | 1 | sp\|P35658\|NU214_HUMAN | NUP214 | 213.49 | 3.2536 |
| 1 | 1 | sp\|Q9NZB8\|MOCS1_HUMAN | MOCS1 | 70.06 | 3.2531 |
| 1 | 1 | sp\|Q96CU9\|FXRD1_HUMAN | FOXRED1 | 53.78 | 3.2527 |
| 1 | 1 | sp\|Q99653\|CHP1_HUMAN | CHP1 | 22.44 | 3.2414 |
| 1 | 1 | sp\|O43306\|ADCY6_HUMAN | ADCY6 | 130.53 | 3.2381 |
| 1 | 1 | sp\|Q8NB90\|SPAT5_HUMAN | SPATA5 | 97.84 | 3.2371 |
| 1 | 1 | sp\|Q6PML9\|ZNT9_HUMAN | SLC30A9 | 63.47 | 3.2286 |
| 1 | 1 | sp\|Q8TCJ2\|STT3B_HUMAN | STT3B | 93.61 | 3.213 |
| 1 | 1 | sp\|Q9UI10\|EI2BD_HUMAN | EIF2B4 | 57.52 | 3.2073 |
| 1 | 1 | sp\|O76021\|RL1D1_HUMAN | RSL1D1 | 54.94 | 3.2001 |
| 1 | 1 | sp\|O75494\|SRS10_HUMAN | SRSF10 | 31.28 | 3.1959 |
| 1 | 1 | sp\|Q8WUK0\|PTPM1_HUMAN | PTPMT1 | 22.83 | 3.1906 |
| 1 | 1 | sp\|P62805\|H4_HUMAN | HIST1H4A | 11.36 | 3.1841 |
| 1 | 1 | sp\|Q15366\|PCBP2_HUMAN | PCBP2 | 38.56 | 3.1618 |
| 1 | 1 | sp\|Q96HW7\|INT4_HUMAN | INTS4 | 108.1 | 3.1575 |
| 1 | 1 | sp\|Q8TE59\|ATS19_HUMAN | ADAMTS19 | 133.96 | 3.1453 |
| 1 | 1 | sp\|Q9NQ50\|RM40_HUMAN | MRPL40 | 24.48 | 3.1291 |
| 1 | 1 | sp\|Q66K74\|MAP1S_HUMAN | MAP1S | 112.14 | 3.1258 |
| 1 | 1 | sp\|Q96JP5\|ZFP91_HUMAN | ZFP91 | 63.41 | 3.1186 |
| 1 | 1 | sp\|P82933\|RT09_HUMAN | MRPS9 | 45.81 | 3.1013 |
| 1 | 1 | sp\|O14981\|BTAF1_HUMAN | BTAF1 | 206.76 | 3.0838 |
| 1 | 1 | sp\|Q14008\|CKAP5_HUMAN | CKAP5 | 225.35 | 3.0668 |
| 1 | 1 | sp\|Q8IZ69\|TRM2A_HUMAN | TRMT2A | 68.68 | 3.0458 |
| 1 | 1 | sp\|Q9H1X3\|DJC25_HUMAN | DNAJC25 | 42.38 | 3.0282 |
| 1 | 1 | sp\|Q7Z406\|MYH14_HUMAN | MYH14 | 227.73 | 3.0134 |
| 1 | 1 | tr\|Q3B7X4\|Q3B7X4_HUMAN | IMMT | 40.47 | 3.0118 |
| 1 | 1 | sp\|Q8WY07\|CTR3_HUMAN | SLC7A3 | 67.13 | 2.9945 |
| 1 | 1 | sp\|Q6UX07\|DHR13_HUMAN | DHRS13 | 40.82 | 2.9688 |
| 1 | 1 | sp\|O00217\|NDUS8_HUMAN | NDUFS8 | 23.69 | 2.948 |
| 1 | 1 | sp\|Q9Y3D6\|FIS1_HUMAN | FIS1 | 16.93 | 2.9299 |
| 1 | 1 | sp\|Q92522\|H1X_HUMAN | H1FX | 22.47 | 2.9236 |
| 1 | 1 | sp\|Q9H490\|PIGU_HUMAN | PIGU | 50.02 | 2.9229 |
| 1 | 1 | sp\|P49368\|TCPG_HUMAN | CCT3 | 60.5 | 2.917 |
| 1 | 1 | sp\|Q9H974\|QTRT2_HUMAN | QTRT2 | 46.68 | 2.9127 |
| 1 | 1 | sp\|Q8WUB8\|PHF10_HUMAN | PHF10 | 56.02 | 2.9119 |
| 1 | 1 | KV2A7_MOUSE | | 12.27 | 2.8807 |
| 1 | 1 | sp\|Q9NXS2\|QPCTL_HUMAN | QPCTL | 42.9 | 2.8763 |
| 1 | 1 | sp\|Q9Y584\|TIM22_HUMAN | TIMM22 | 20.02 | 2.8643 |
| 1 | 1 | sp\|P42356\|PI4KA_HUMAN | PI4KA | 236.68 | 2.8615 |
| 1 | 1 | sp\|Q86TW2\|ADCK1_HUMAN | ADCK1 | 60.54 | 2.8425 |
| 1 | 1 | sp\|Q8TAE8\|G45IP_HUMAN | GADD45GIP1 | 25.37 | 2.8196 |
| 1 | 1 | sp\|O15523\|DDX3Y_HUMAN | DDX3Y | 73.11 | 2.8124 |
| 1 | 1 | sp\|O75323\|NIPS2_HUMAN | NIPSNAP2 | 33.72 | 2.7929 |
| 1 | 1 | sp\|Q9UBD5\|ORC3_HUMAN | ORC3 | 82.2 | 2.7077 |
| 1 | 1 | sp\|O95070\|YIF1A_HUMAN | YIF1A | 31.99 | 2.6979 |
| 1 | 1 | sp\|P42695\|CNDD3_HUMAN | NCAPD3 | 168.78 | 2.6917 |
| 1 | 1 | sp\|P06493\|CDK1_HUMAN | CDK1 | 34.07 | 2.6561 |
| 1 | 1 | sp\|Q09161\|NCBP1_HUMAN | NCBP1 | 91.78 | 2.6544 |
| 1 | 1 | sp\|Q8IUX1\|T126B_HUMAN | TMEM126B | 25.93 | 2.6456 |
| 1 | 1 | tr\|B3KUE6\|B3KUE6_HUMAN | | 30.19 | 2.6448 |
| 1 | 1 | sp\|Q9BVK8\|TM147_HUMAN | TMEM147 | 25.24 | 2.642 |
| 1 | 1 | sp\|Q53R41\|FAKD1_HUMAN | FASTKD1 | 97.35 | 2.6172 |
| 1 | 1 | sp\|O00483\|NDUA4_HUMAN | NDUFA4 | 9.36 | 2.6166 |
| 1 | 1 | sp\|P61026\|RAB10_HUMAN | RAB10 | 22.53 | 2.596 |
| 1 | 1 | sp\|Q96A65\|EXOC4_HUMAN | EXOC4 | 110.43 | 2.5958 |
| 1 | 1 | tr\|Q6FI97\|Q6FI97_HUMAN | BAF53A | 47.35 | 2.5795 |
| 1 | 1 | sp\|Q15392\|DHC24_HUMAN | DHCR24 | 60.06 | 2.5722 |
| 1 | 1 | sp\|P83731\|RL24_HUMAN | RPL24 | 17.77 | 2.5706 |
| 1 | 1 | sp\|Q9NZJ7\|MTCH1_HUMAN | MTCH1 | 41.52 | 2.5516 |
| 1 | 1 | sp\|Q9BUN8\|DERL1_HUMAN | DERL1 | 28.78 | 2.5224 |
| 1 | 1 | sp\|P46783\|RS10_HUMAN | RPS10 | 18.89 | 2.5189 |
| 1 | 1 | sp\|O43390\|HNRPR_HUMAN | HNRNPR | 70.9 | 2.5031 |
| 1 | 1 | sp\|O60673\|REV3L_HUMAN | REV3L | 352.55 | 2.4985 |
| 1 | 1 | sp\|Q8IVH4\|MMAA_HUMAN | MMAA | 46.51 | 2.4963 |
| 1 | 1 | sp\|Q16563\|SYPL1_HUMAN | SYPL1 | 28.55 | 2.4909 |
| 1 | 1 | sp\|O14735\|CDIPT_HUMAN | CDIPT | 23.52 | 2.475 |
| 1 | 1 | sp\|Q9BSJ2\|GCP2_HUMAN | TUBGCP2 | 102.47 | 2.4439 |
| 1 | 1 | sp\|P62701\|RS4X_HUMAN | RPS4X | 29.58 | 2.4418 |
| 1 | 1 | sp\|Q14683\|SMC1A_HUMAN | SMC1A | 143.14 | 2.4391 |
| 1 | 1 | sp\|P08559\|ODPA_HUMAN | PDHA1 | 43.27 | 2.4288 |
| 1 | 1 | sp\|Q9Y651\|SOX21_HUMAN | SOX21 | 28.56 | 2.4124 |
| 1 | 1 | sp\|Q96JX3\|SRAC1_HUMAN | SERAC1 | 74.1 | 2.3968 |
| 1 | 1 | sp\|Q8NDZ4\|DIA1_HUMAN | C3orf58 | 49.45 | 2.3757 |
| 1 | 1 | sp\|P46013\|KI67_HUMAN | MKI67 | 358.47 | 2.3711 |
| 1 | 1 | sp\|P68871\|HBB_HUMAN | HBB | 15.99 | 2.3665 |
| 1 | 1 | sp\|P12036\|NFH_HUMAN | NEFH | 112.41 | 2.3587 |
| 1 | 1 | sp\|Q5T0B9\|ZN362_HUMAN | ZNF362 | 45.79 | 2.3304 |
| 1 | 1 | sp\|Q9H0D6\|XRN2_HUMAN | XRN2 | 108.51 | 2.3224 |
| 1 | 1 | tr\|Q96DP0\|Q96DP0_HUMAN | | 49.22 | 2.2814 |
| 1 | 1 | sp\|O60725\|ICMT_HUMAN | ICMT | 31.92 | 2.2483 |
| 1 | 1 | sp\|Q8N4U5\|T11L2_HUMAN | TCP11L2 | 58.05 | 2.2363 |
| 1 | 1 | sp\|Q9UL03\|INT6_HUMAN | INTS6 | 100.33 | 2.1871 |
| 1 | 1 | sp\|P43007\|SATT_HUMAN | SLC1A4 | 55.69 | 2.1855 |
| 1 | 1 | sp\|Q6VAB6\|KSR2_HUMAN | KSR2 | 107.56 | 2.1832 |
| 1 | 1 | sp\|Q9NWU5\|RM22_HUMAN | MRPL22 | 23.63 | 2.1812 |
| 1 | 1 | tr\|B4DL14\|B4DL14_HUMAN | | 27.5 | 2.1811 |
| 1 | 1 | sp\|Q6YN16\|HSDL2_HUMAN | HSDL2 | 45.37 | 2.1314 |
| 1 | 1 | sp\|Q9NVH2\|INT7_HUMAN | INTS7 | 106.77 | 2.1225 |
| 1 | 1 | sp\|P41219\|PERI_HUMAN | PRPH | 53.62 | 2.117 |
| 1 | 1 | sp\|Q9P0U1\|TOM7_HUMAN | TOMM7 | 6.24 | 2.094 |
| 1 | 1 | sp\|P01857\|IGHG1_HUMAN | IGHG1 | 36.08 | 2.092 |
| 1 | 1 | sp\|Q9Y4F1\|FARP1_HUMAN | FARP1 | 118.56 | 2.0479 |
| 1 | 1 | sp\|O75964\|ATP5L_HUMAN | ATP5L | 11.42 | 2.0435 |
| 1 | 1 | tr\|A0A1W2PP06\|A0A1W2PP06_HUMAN | KCNMA1 | 136.96 | 2.0205 |
| 1 | 1 | sp\|Q92604\|LGAT1_HUMAN | LPGAT1 | 43.06 | 2.0192 |
| 1 | 1 | sp\|Q8WZA0\|LZIC_HUMAN | LZIC | 21.48 | 1.9913 |

TABLE 5E
Ubiquitination report
HA-SS18SSX_CHR

| | | ↓ | | | | | | Gene |
|---|---|---|---|---|---|---|---|---|
| ScanF | Z | XCorr | ΔCorr | # Ions | Reference | Redun | Peptide | Symbol |
| 18257 | 3 | 4.935 | 0.033 | 30/76 | sp\|Q96KK5\|H2A1H_HUMAN | 19 | K.VTIAQGGVLPNIQAVLLPK#K.T | HIST1H2AH |
| | | | | | | | (SEQ ID NO: 229) | |

[0536] Purification of SS18-SSX-bound complexes followed by density sedimentation using 10-30% glycerol gradients revealed larger-sized fusion-containing BAF complexes migrating in fractions 15-19, compared to WT SS18-bound complexes in fractions 13-14, as expected (Mashtalir et al. (2018) Cell 175:1272-1288), indicating high-affinity, stable binding of SS18-SSX-bound BAF complexes to the full histone octamer (FIG. 1C and FIG. 2H). In addition, histones bound to the ATPase module components were observed in isolation as well as to free SS18-SSX in fractions 9-13 and 2-4, respectively. These results indicate that fusion-containing BAF complexes exhibit exceptionally strong binding to nucleosomes, able to withstand separation even in a high centrifugal force environment, in contrast to WT BAF complexes which exhibit weaker interactions with nucleosomes, as seen consistently in BAF complex purifications performed to date (Mashtalir et al. (2018) Cell 175:1272-1288). Finally, to determine the relative chromatin affinities of WT BAF complexes versus SS18-SSX-containing BAF complexes, differential salt extraction in both SS cell lines and HEK-293T cells expressing SS18-SSX was performed (FIG. 1D, FIGS. 2C and 2D). Normal extraction profiles for WT complexes were observed (elution at 300-500 mM NaCl), consistent with previous findings (Nakayama et al. (2017) Nat. Genet. 49:1613-1623; Pan et al. (2019) Nat. Genet. 51:618-626). However, fusion-containing complexes remained insoluble in up to 1M NaCl. In support of these findings, fluorescence recovery after photobleaching (FRAP) experiments in HEK-293T cells infected with either GFP-SS18 or GFP-SS18-SSX revealed substantially increased chromatin residency times for SS18-SSX-bound BAF complexes (FIG. 1E and FIG. 2E). Taken together, these findings indicate an unexpected, uniquely high-affinity conjugation of SS18-SSX-bound BAF complexes to nucleosomes, a property specific to this disease-associated BAF complex perturbation, indicating this as a feature that can underlie the site-specific targeting of SS18-SSX complexes on chromatin.

### Example 3: A Minimal 34-Aa Region of SSX is Necessary and Sufficient for Direct Binding to Repressive Nucleosomes and SS18-SSX-Mediated Oncogenic Functions

[0537] Given these results, it was next determined whether the 78 residues of SSX in isolation (not fused to the SS18 subunit and hence not part of BAF complexes) could directly bind nucleosomes and could be responsible for conferring the unique affinity and nucleosome binding properties of the SS18-SSX fusion protein. Indeed, pull-down experiments revealed that the C-terminal 78 residues of SSX (aa 111-188) were sufficient for its nucleosomal interactions (FIG. 3A and FIGS. 4A-4B). In addition, it was found that binding to mammalian nucleosomes (purified via MNase digestion of HEK-293T cell chromatin and hence representing the diverse array of histone variants and modifications) was stronger than binding to recombinant, unmodified nucleosomes (FIGS. 4C and 4G), indicating that a mammalian histone modification can provide added affinity and site specificity. In agreement with this, targeted quantitative mass-spectrometry (MS) analysis of SSX-bound mammalian nucleosomes (pooled, purified by MNase digestion from HEK-293T cells, containing the full diversity of histone marks) revealed strong enrichment of nucleosomes decorated with known repressive histone marks and depletion of nucleosomes marked with known activation marks (FIG. 3B, FIGS. 4D-4F, and FIG. 4H, Tables 6A-6C). For example, SSX-mediated enrichment of nucleosomes decorated with repressive marks such as H3K27me3 and H3K9me3, and SSX-mediated depletion of nucleosomes decorated with activating marks such as H4 lysine acetylation and H3K4me2/3 were detected (while nucleosomes containing unmodified H4 and H3 were enriched). Further, immunofluorescence (IF) analyses revealed strong colocalization of SS18-SSX as well as SSX in isolation (SSX aa 1-188, as expressed in testes) to Barr bodies marked with repressive PRC1 and PRC2 complexes and their marks (FIG. 3C and FIGS. 5A-5B).

TABLE 6A
log2norm: (Light/Heavy) intensity ratios are normalized to the (Light/Heavy) intensity ratio of
respective histone “norm” peptide, and brought into log2 space. Cells with #N/A were below l.o.d

| | Histone Mark | | | | | |
|---|---|---|---|---|---|---|
| | | MM01_A01 | MM02_B01 | MM03_C01 | MM04_D01 | MM05_E01 |
| | | Cell Line | | | | |
| | | HEK293T | HEK293T | HEK293T | HEK293T | HEK293T |
| | | Perturbation | | | | |
| | | pull down | pull down | pull down | SSX1 | SSX1 |
| | Parent Peptide | input | input | input | pulldown | pulldo |
| Experiment | | 1 | 1 | 1 | 1 | 1 |
| H4(4to17)ac0me0 | H4K5K8K12K16 | −0.999 | −0.768 | −0.681 | −0.613 | −0.573 |
| H4(4to17)K5ac1me0 | H4K5K8K12K16 | 0.048 | 0.332 | 0.333 | −0.053 | 0.075 |
| H4(4to17)K12ac1me0 | H4K5K8K12K16 | −0.327 | 0.036 | 0.140 | −0.207 | −0.275 |
| H4(4to17)K16ac1me0 | H4K5K8K12K16 | −0.265 | −0.168 | −0.258 | −0.391 | −0.337 |
| H4(4to17)K8ac1K12ac1me0 | H4K5K8K12K16 | −0.117 | 0.026 | 0.240 | −0.198 | −0.093 |
| H4(4to17)K5ac1K8ac1me0 | H4K5K8K12K16 | 0.502 | 0.475 | 0.651 | 0.107 | 0.094 |
| H4(4to17)K5ac1K16ac1me0 | H4K5K8K12K16 | 0.618 | 0.676 | 0.621 | 0.226 | 0.367 |
| H4(4to17)K12ac1K16ac1me0 | H4K5K8K12K16 | 0.411 | 0.391 | 0.424 | 0.204 | 0.304 |
| H4(4to17)K5ac1K8ac1K12ac1me0 | H4K5K8K12K16 | −0.054 | 0.091 | 0.312 | −0.223 | −0.270 |
| H4(4to17)K8ac1K12ac1K16ac1me0 | H4K5K8K12K16 | 0.816 | 0.897 | 1.090 | 0.677 | 0.625 |
| H4(4to17)K5ac1K8ac1K16ac1me0 | H4K5K8K12K16 | 0.819 | 0.755 | 0.972 | 0.474 | 0.311 |
| H4(4to17)K5ac1K8ac1K12ac1K16ac1me0 | H4K5K8K12K16 | 0.718 | 0.864 | 1.040 | 0.276 | 0.245 |
| H4(20to23)K20me0 | H4K20 | −0.045 | −0.175 | 0.077 | 0.017 | 0.092 |
| H4(20to23)K20me1 | H4K20 | −0.658 | −0.526 | −0.731 | −0.427 | −0.443 |
| H4(20to23)K20me2 | H4K20 | −0.424 | −0.453 | −0.437 | −0.414 | −0.391 |
| H4(20to23)K20me3 | H4K20 | 0.161 | 0.261 | 0.136 | −0.109 | 0.055 |
| H2AZ(1to19)ac0 | H2A.Z | −0.160 | −0.062 | −0.047 | −0.784 | −0.697 |
| H2AZ(1to19)K4ac1 | H2A.Z | 0.890 | 1.031 | 0.906 | −0.217 | 0.048 |
| H2B(1to29)ac0 | H2B | 0.112 | −0.187 | −0.042 | 0.152 | 0.160 |
| H2B(1to29)K5ac1 | H2B | 0.234 | 0.001 | 0.124 | 0.273 | 0.323 |
| H2A(4to11)ac0 | H2AK5K9 | −0.187 | −0.105 | 0.115 | −0.026 | 0.061 |
| H2A(4to11)K5ac1 | H2AK5K9 | 0.275 | 0.713 | 0.614 | 0.569 | 0.624 |
| H2A(4to11)K9ac1 | H2AK5K9 | −0.837 | −0.552 | −0.586 | −0.254 | −0.375 |
| H2A(4to11)K5ac1K9ac1 | H2AK5K9 | −0.224 | −0.043 | 0.025 | −0.031 | −0.049 |
| H2A(12to17)ac0 | H2AK13K15 | −0.521 | −0.203 | 0.070 | 0.201 | −0.120 |
| H2A(12to17)K13ac1 | H2AK13K15 | −0.459 | −0.129 | −0.116 | 0.032 | −0.047 |
| H2A(12to17)K15ac1 | H2AK13K15 | −0.430 | −0.070 | 0.035 | 0.042 | −0.086 |
| H3K4me0 | H3K4 | −0.049 | 0.108 | 0.047 | 0.549 | 0.339 |
| H3K4me1 | H3K4 | 0.393 | 0.542 | 0.415 | 0.740 | 0.353 |
| H3K4me2 | H3K4 | 0.848 | 0.992 | 0.801 | 0.778 | 0.532 |
| H3K4me3 | H3K4 | 0.953 | 1.142 | 0.953 | 0.766 | 0.505 |
| H3K4ac1 | H3K4 | 0.485 | 0.651 | 0.588 | 0.263 | 0.320 |
| H3K9me0K14ac0 | H3K9K14 | −0.262 | −0.323 | −0.280 | 0.274 | −0.036 |
| H3K9me1K14ac0 | H3K9K14 | −0.501 | −0.392 | −0.314 | 0.206 | 0.046 |
| H3K9me2K14ac0 | H3K9K14 | −0.585 | −0.359 | −0.568 | 0.035 | −0.284 |
| H3K9me3K14ac0 | H3K9K14 | −0.364 | −0.401 | −0.153 | 0.348 | 0.123 |
| H3K9ac1K14ac0 | H3K9K14 | 1.020 | 1.120 | 0.965 | 1.203 | 1.075 |
| H3K9me0K14ac1 | H3K9K14 | 0.271 | 0.259 | −0.018 | 0.637 | 0.469 |
| H3K9me1K14ac1 | H3K9K14 | 0.565 | 0.691 | 0.585 | 0.769 | 0.508 |
| H3K9me2K14ac1 | H3K9K14 | 0.390 | 0.458 | 0.421 | 0.724 | 0.530 |
| H3K9me3K14ac1 | H3K9K14 | 0.657 | 0.663 | 0.268 | 0.828 | 0.602 |
| H3K9ac1K14ac1 | H3K9K14 | 1.842 | 1.990 | 1.786 | 2.038 | 1.804 |
| H3K9me0S10ph1K14ac0 | H3K9K14 | −2.614 | −3.006 | −2.823 | #N/A | #N/A |
| H3K9me1S10ph1K14ac0 | H3K9K14 | −2.261 | −2.090 | −2.268 | #N/A | #N/A |
| H3K9me2S10ph1K14ac0 | H3K9K14 | −2.004 | −1.899 | −2.048 | −0.683 | −1.092 |
| H3K9me3S10ph1K14ac0 | H3K9K14 | −0.920 | −0.606 | −0.834 | −0.566 | −1.026 |
| H3K9me0S10ph1K14ac1 | H3K9K14 | −2.471 | −2.280 | −1.882 | #N/A | #N/A |
| H3K9me1S10ph1K14ac1 | H3K9K14 | −2.299 | −3.153 | −3.422 | −2.668 | −2.507 |
| H3K9me2S10ph1K14ac1 | H3K9K14 | −1.957 | −2.023 | −2.085 | −0.870 | −1.009 |
| H3K18ac0K23ac0 | H3K18K23 | −0.505 | −0.140 | −0.317 | 0.268 | 0.069 |
| H3K18ac1K23ac0 | H3K18K23 | 1.168 | 1.411 | 1.229 | 1.341 | 1.185 |
| H3K18ac0K23ac1 | H3K18K23 | 0.768 | 1.061 | 0.574 | 1.141 | 1.021 |
| H3K18ac1K23ac1 | H3K18K23 | 2.134 | 2.522 | 2.107 | 2.137 | 1.988 |
| H3K27me0K36me0 | H3K27K36 | −0.169 | 0.187 | −0.678 | 0.552 | 0.233 |
| H3K27me0K36me1 | H3K27K36 | −0.407 | −0.152 | −0.659 | 0.384 | −0.066 |
| H3K27me0K36me2 | H3K27K36 | −0.476 | −0.061 | −0.419 | 0.674 | 0.270 |
| H3K27me0K36me3 | H3K27K36 | −0.057 | −0.001 | 0.070 | 0.678 | 0.669 |
| H3K27me1K36me0 | H3K27K36 | −0.086 | 0.026 | −0.148 | 0.396 | 0.104 |
| H3K27me1K36me1 | H3K27K36 | −0.194 | 0.078 | −0.086 | 0.535 | 0.196 |
| H3K27me1K36me2 | H3K27K36 | 0.248 | 0.397 | 0.323 | 0.741 | 0.461 |
| H3K27me1K36me3 | H3K27K36 | 0.229 | 0.344 | 0.296 | 1.283 | 0.859 |
| H3K27me2K36me0 | H3K27K36 | −0.337 | −0.004 | −0.152 | 0.382 | 0.209 |
| H3K27me2K36me1 | H3K27K36 | −0.092 | −0.102 | 0.017 | 0.363 | 0.186 |
| H3K27me2K36me2 | H3K27K36 | 0.249 | 0.342 | 0.242 | 0.553 | 0.417 |
| H3K27me2K36me3 | H3K27K36 | 1.050 | 1.018 | 0.643 | #N/A | #N/A |
| H3K27me3K36me0 | H3K27K36 | 0.209 | 0.291 | 0.081 | 0.689 | 0.037 |
| H3K27me3K36me1 | H3K27K36 | −0.214 | 0.212 | −0.178 | 0.391 | 0.170 |
| H3K27me3K36me2 | H3K27K36 | 0.236 | 0.259 | 0.066 | 0.085 | −0.151 |
| H3K27me3K36me3 | H3K27K36 | 1.439 | 1.614 | 1.393 | #N/A | #N/A |
| H3K27ac1K36me0 | H3K27K36 | 1.564 | #N/A | 1.201 | 1.481 | #N/A |
| H3K27ac1K36me1 | H3K27K36 | 1.131 | 1.759 | 1.594 | #N/A | #N/A |
| H3K27ac1K36me3 | H3K27K36 | 1.652 | 1.675 | 1.562 | 2.134 | 2.004 |
| H3K56me0 | H3K56 | 0.111 | 0.303 | −0.071 | 0.856 | 0.297 |
| H3K79me1 | H3K79 | 0.268 | 0.441 | 0.301 | 0.954 | 0.540 |
| H3K79me2 | H3K79 | 0.498 | 0.469 | 0.455 | 0.826 | 0.557 |

TABLE 6B
replace na: values from Tables 6A are copy/pasted and “#N/A” values are removed. The third to seventh columns
separate values by experiment. Columns to the right of the matrix calculate required averages and medians for subsequent analyses.

| | Histone Mark | | | | | | | |
|---|---|---|---|---|---|---|---|---|
| | | MM01_A01 | MM02_B01 | MM03_C01 | MM04_D01 | MM05_E01 | | |
| | | Cell Line | | | | | | |
| | | HEK293T | HEK293T | HEK293T | HEK293T | HEK293T | | |
| | | Perturbation | | | | | | |
| | | pull down | pull down | pull down | SSX1 | SSX1 | pulldown | Median across |
| | Parent Peptide | input | input | input | pulldown | pulldown | ctrl avg | all experiments |
| H4(4to17)ac0me0 | H4K5K8K12K1 | −0.999 | −0.768 | −0.681 | −0.613 | −0.573 | −0.816 | −0.681 |
| H4(4to17)K5ac1me0 | H4K5K8K12K1 | 0.048 | 0.332 | 0.333 | −0.053 | 0.075 | 0.237 | 0.075 |
| H4(4to17)K12ac1me0 | H4K5K8K12K1 | −0.327 | 0.036 | 0.140 | −0.207 | −0.275 | −0.050 | −0.207 |
| H4(4to17)K16ac1me0 | H4K5K8K12K1 | −0.265 | −0.168 | −0.258 | −0.391 | −0.337 | −0.230 | −0.265 |
| H4(4to17)K8ac1K12ac1me0 | H4K5K8K12K1 | −0.117 | 0.026 | 0.240 | −0.198 | −0.093 | 0.050 | −0.093 |
| H4(4to17)K5ac1K8ac1me0 | H4K5K8K12K1 | 0.502 | 0.475 | 0.651 | 0.107 | 0.094 | 0.543 | 0.475 |
| H4(4to17)K5ac1K16ac1me0 | H4K5K8K12K1 | 0.618 | 0.676 | 0.621 | 0.226 | 0.367 | 0.638 | 0.618 |
| H4(4to17)K12ac1K16ac1me | H4K5K8K12K1 | 0.411 | 0.391 | 0.424 | 0.204 | 0.304 | 0.409 | 0.391 |
| H4(4to17)K5ac1K8ac1K12ac | H4K5K8K12K1 | −0.054 | 0.091 | 0.312 | −0.223 | −0.270 | 0.116 | −0.054 |
| H4(4to17)K8ac1K12ac1K16a | H4K5K8K12K1 | 0.816 | 0.897 | 1.090 | 0.677 | 0.625 | 0.935 | 0.816 |
| H4(4to17)K5ac1K8ac1K16ac | H4K5K8K12K1 | 0.819 | 0.755 | 0.972 | 0.474 | 0.311 | 0.849 | 0.755 |
| H4(4to17)K5ac1K8ac1K12ac | H4K5K8K12K1 | 0.718 | 0.864 | 1.040 | 0.276 | 0.245 | 0.874 | 0.718 |
| H4(20to23)K20me0 | H4K20 | −0.045 | −0.175 | 0.077 | 0.017 | 0.092 | −0.048 | 0.017 |
| H4(20to23)K20me1 | H4K20 | −0.658 | −0.526 | −0.731 | −0.427 | −0.443 | −0.638 | −0.526 |
| H4(20to23)K20me2 | H4K20 | −0.424 | −0.453 | −0.437 | −0.414 | −0.391 | −0.438 | −0.424 |
| H4(20to23)K20me3 | H4K20 | 0.161 | 0.261 | 0.136 | −0.109 | 0.055 | 0.186 | 0.136 |
| H2AZ(1to19)ac0 | H2A.Z | −0.160 | −0.062 | −0.047 | −0.784 | −0.697 | −0.090 | −0.160 |
| H2AZ(1to19)K4ac1 | H2A.Z | 0.890 | 1.031 | 0.906 | −0.217 | 0.048 | 0.943 | 0.890 |
| H2B(1to29)ac0 | H2B | 0.112 | −0.187 | −0.042 | 0.152 | 0.160 | −0.039 | 0.112 |
| H2B(1to29)K5ac1 | H2B | 0.234 | 0.001 | 0.124 | 0.273 | 0.323 | 0.120 | 0.234 |
| H2A(4to11)ac0 | H2AK5K9 | −0.187 | −0.105 | 0.115 | −0.026 | 0.061 | −0.059 | −0.026 |
| H2A(4to11)K5ac1 | H2AK5K9 | 0.275 | 0.713 | 0.614 | 0.569 | 0.624 | 0.534 | 0.614 |
| H2A(4to11)K9ac1 | H2AK5K9 | −0.837 | −0.552 | −0.586 | −0.254 | −0.375 | −0.658 | −0.552 |
| H2A(4to11)K5ac1K9ac1 | H2AK5K9 | −0.224 | −0.043 | 0.025 | −0.031 | −0.049 | −0.081 | −0.043 |
| H2A(12to17)ac0 | H2AK13K15 | −0.521 | −0.203 | 0.070 | 0.201 | −0.120 | −0.218 | −0.120 |
| H2A(12to17)K13ac1 | H2AK13K15 | −0.459 | −0.129 | −0.116 | 0.032 | −0.047 | −0.234 | −0.116 |
| H2A(12to17)K15ac1 | H2AK13K15 | −0.430 | −0.070 | 0.035 | 0.042 | −0.086 | −0.155 | −0.070 |
| H3K4me0 | H3K4 | −0.049 | 0.108 | 0.047 | 0.549 | 0.339 | 0.035 | 0.108 |
| H3K4me1 | H3K4 | 0.393 | 0.542 | 0.415 | 0.740 | 0.353 | 0.450 | 0.415 |
| H3K4me2 | H3K4 | 0.848 | 0.992 | 0.801 | 0.778 | 0.532 | 0.881 | 0.801 |
| H3K4me3 | H3K4 | 0.953 | 1.142 | 0.953 | 0.766 | 0.505 | 1.016 | 0.953 |
| H3K4ac1 | H3K4 | 0.485 | 0.651 | 0.588 | 0.263 | 0.320 | 0.575 | 0.485 |
| H3K9me0K14ac0 | H3K9K14 | −0.262 | −0.323 | −0.280 | 0.274 | −0.036 | −0.288 | −0.262 |
| H3K9me1K14ac0 | H3K9K14 | −0.501 | −0.392 | −0.314 | 0.206 | 0.046 | −0.402 | −0.314 |
| H3K9me2K14ac0 | H3K9K14 | −0.585 | −0.359 | −0.568 | 0.035 | −0.284 | −0.504 | −0.359 |
| H3K9me3K14ac0 | H3K9K14 | −0.364 | −0.401 | −0.153 | 0.348 | 0.123 | −0.306 | −0.153 |
| H3K9ac1K14ac0 | H3K9K14 | 1.020 | 1.120 | 0.965 | 1.203 | 1.075 | 1.035 | 1.075 |
| H3K9me0K14ac1 | H3K9K14 | 0.271 | 0.259 | −0.018 | 0.637 | 0.469 | 0.170 | 0.271 |
| H3K9me1K14ac1 | H3K9K14 | 0.565 | 0.691 | 0.585 | 0.769 | 0.508 | 0.614 | 0.585 |
| H3K9me2K14ac1 | H3K9K14 | 0.390 | 0.458 | 0.421 | 0.724 | 0.530 | 0.423 | 0.458 |
| H3K9me3K14ac1 | H3K9K14 | 0.657 | 0.663 | 0.268 | 0.828 | 0.602 | 0.529 | 0.657 |
| H3K9ac1K14ac1 | H3K9K14 | 1.842 | 1.990 | 1.786 | 2.038 | 1.804 | 1.872 | 1.842 |
| H3K9me0S10ph1K14ac0 | H3K9K14 | −2.614 | −3.006 | −2.823 | | | −2.814 | −2.823 |
| H3K9me1S10ph1K14ac0 | H3K9K14 | −2.261 | −2.090 | −2.268 | | | −2.206 | −2.261 |
| H3K9me2S10ph1K14ac0 | H3K9K14 | −2.004 | −1.899 | −2.048 | −0.683 | −1.092 | −1.984 | −1.899 |
| H3K9me3S10ph1K14ac0 | H3K9K14 | −0.920 | −0.606 | −0.834 | −0.566 | −1.026 | −0.787 | −0.834 |
| H3K9me0S10ph1K14ac1 | H3K9K14 | −2.471 | −2.280 | −1.882 | | | −2.211 | −2.280 |
| H3K9me1S10ph1K14ac1 | H3K9K14 | −2.299 | −3.153 | −3.422 | −2.668 | −2.507 | −2.958 | −2.668 |
| H3K9me2S10ph1K14ac1 | H3K9K14 | −1.957 | −2.023 | −2.085 | −0.870 | −1.009 | −2.022 | −1.957 |
| H3K18ac0K23ac0 | H3K18K23 | −0.505 | −0.140 | −0.317 | 0.268 | 0.069 | −0.321 | −0.140 |
| H3K18ac1K23ac0 | H3K18K23 | 1.168 | 1.411 | 1.229 | 1.341 | 1.185 | 1.270 | 1.229 |
| H3K18ac0K23ac1 | H3K18K23 | 0.768 | 1.061 | 0.574 | 1.141 | 1.021 | 0.801 | 1.021 |
| H3K18ac1K23ac1 | H3K18K23 | 2.134 | 2.522 | 2.107 | 2.137 | 1.988 | 2.254 | 2.134 |
| H3K27me0K36me0 | H3K27K36 | −0.169 | 0.187 | −0.678 | 0.552 | 0.233 | −0.220 | 0.187 |
| H3K27me0K36me1 | H3K27K36 | −0.407 | −0.152 | −0.659 | 0.384 | −0.066 | −0.406 | −0.152 |
| H3K27me0K36me2 | H3K27K36 | −0.476 | −0.061 | −0.419 | 0.674 | 0.270 | −0.319 | −0.061 |
| H3K27me0K36me3 | H3K27K36 | −0.057 | −0.001 | 0.070 | 0.678 | 0.669 | 0.004 | 0.070 |
| H3K27me1K36me0 | H3K27K36 | −0.086 | 0.026 | −0.148 | 0.396 | 0.104 | −0.069 | 0.026 |
| H3K27me1K36me1 | H3K27K36 | −0.194 | 0.078 | −0.086 | 0.535 | 0.196 | −0.067 | 0.078 |
| H3K27me1K36me2 | H3K27K36 | 0.248 | 0.397 | 0.323 | 0.741 | 0.461 | 0.322 | 0.397 |
| H3K27me1K36me3 | H3K27K36 | 0.229 | 0.344 | 0.296 | 1.283 | 0.859 | 0.289 | 0.344 |
| H3K27me2K36me0 | H3K27K36 | −0.337 | −0.004 | −0.152 | 0.382 | 0.209 | −0.164 | −0.004 |
| H3K27me2K36me1 | H3K27K36 | −0.092 | −0.102 | 0.017 | 0.363 | 0.186 | −0.059 | 0.017 |
| H3K27me2K36me2 | H3K27K36 | 0.249 | 0.342 | 0.242 | 0.553 | 0.417 | 0.278 | 0.342 |
| H3K27me2K36me3 | H3K27K36 | 1.050 | 1.018 | 0.643 | | | 0.904 | 1.018 |
| H3K27me3K36me0 | H3K27K36 | 0.209 | 0.291 | 0.081 | 0.689 | 0.037 | 0.194 | 0.209 |
| H3K27me3K36me1 | H3K27K36 | −0.214 | 0.212 | −0.178 | 0.391 | 0.170 | −0.060 | 0.170 |
| H3K27me3K36me2 | H3K27K36 | 0.236 | 0.259 | 0.066 | 0.085 | −0.151 | 0.187 | 0.085 |
| H3K27me3K36me3 | H3K27K36 | 1.439 | 1.614 | 1.393 | | | 1.482 | 1.439 |
| H3K27ac1K36me0 | H3K27K36 | 1.564 | | 1.201 | 1.481 | | 1.382 | 1.481 |
| H3K27ac1K36me1 | H3K27K36 | 1.131 | 1.759 | 1.594 | | | 1.494 | 1.594 |
| H3K27ac1K36me3 | H3K27K36 | 1.652 | 1.675 | 1.562 | 2.134 | 2.004 | 1.630 | 1.675 |
| H3K56me0 | H3K56 | 0.111 | 0.303 | −0.071 | 0.856 | 0.297 | 0.114 | 0.297 |
| H3K79me1 | H3K79 | 0.268 | 0.441 | 0.301 | 0.954 | 0.540 | 0.337 | 0.441 |
| H3K79me2 | H3K79 | 0.498 | 0.469 | 0.455 | 0.826 | 0.557 | 0.474 | 0.498 |

TABLE 6C
norm to ctrl avg: normalizing experiment values to average value for control samples.

| | Histone Mark | | | | | |
|---|---|---|---|---|---|---|
| | | MM01_A01 | MM02_B01 | MM03_C01 | MM04_D01 | MM05_E01 |
| | | Cell Line | | | | |
| | | HEK293T | HEK293T | HEK293T | HEK293T | HEK293T |
| | | Perturbation | | | | |
| | | pull down | pull down | pull down | SSX1 | SSX1 |
| | Parent Peptide | input | input | input | pulldown | pulldown |
| H4(4to17)ac0me0 | H4K5K8K12K16 | −0.183 | 0.048 | 0.135 | 0.203 | 0.243 |
| H4(4to17)K5ac1me0 | H4K5K8K12K16 | −0.190 | 0.094 | 0.095 | −0.291 | −0.162 |
| H4(4to17)K12ac1me0 | H4K5K8K12K16 | −0.277 | 0.086 | 0.191 | −0.156 | −0.225 |
| H4(4to17)K16ac1me0 | H4K5K8K12K16 | −0.034 | 0.062 | −0.028 | −0.161 | −0.106 |
| H4(4to17)K8ac1K12ac1me0 | H4K5K8K12K16 | −0.166 | −0.024 | 0.190 | −0.247 | −0.143 |
| H4(4to17)K5ac1K8ac1me0 | H4K5K8K12K16 | −0.041 | −0.067 | 0.108 | −0.436 | −0.448 |
| H4(4to17)K5ac1K16ac1me0 | H4K5K8K12K16 | −0.020 | 0.038 | −0.018 | −0.412 | −0.272 |
| H4(4to17)K12ac1K16ac1me0 | H4K5K8K12K16 | 0.002 | −0.018 | 0.016 | −0.204 | −0.105 |
| H4(4to17)K5ac1K8ac1K12ac1me0 | H4K5K8K12K16 | −0.170 | −0.026 | 0.195 | −0.340 | −0.387 |
| H4(4to17)K8ac1K12ac1K16ac1me0 | H4K5K8K12K16 | −0.118 | −0.037 | 0.155 | −0.258 | −0.309 |
| H4(4to17)K5ac1K8ac1K16ac1me0 | H4K5K8K12K16 | −0.029 | −0.094 | 0.123 | −0.375 | −0.537 |
| H4(4to17)K5ac1K8ac1K12ac1K16ac1me0 | H4K5K8K12K16 | −0.156 | −0.010 | 0.166 | −0.599 | −0.629 |
| H4(20to23)K20me0 | H4K20 | 0.003 | −0.127 | 0.125 | 0.065 | 0.140 |
| H4(20to23)K20me1 | H4K20 | −0.019 | 0.112 | −0.093 | 0.211 | 0.195 |
| H4(20to23)K20me2 | H4K20 | 0.014 | −0.015 | 0.001 | 0.024 | 0.047 |
| H4(20to23)K20me3 | H4K20 | −0.025 | 0.075 | −0.050 | −0.295 | −0.131 |
| H2AZ(1to19)ac0 | H2A.Z | −0.071 | 0.028 | 0.043 | −0.694 | −0.608 |
| H2AZ(1to19)K4ac1 | H2A.Z | −0.052 | 0.089 | −0.036 | −1.159 | −0.894 |
| H2B(1to29)ac0 | H2B | 0.151 | −0.148 | −0.003 | 0.191 | 0.199 |
| H2B(1to29)K5ac1 | H2B | 0.114 | −0.118 | 0.004 | 0.154 | 0.203 |
| H2A(4to11)ac0 | H2AK5K9 | −0.128 | −0.046 | 0.174 | 0.033 | 0.120 |
| H2A(4to11)K5ac1 | H2AK5K9 | −0.259 | 0.179 | 0.080 | 0.036 | 0.090 |
| H2A(4to11)K9ac1 | H2AK5K9 | −0.179 | 0.106 | 0.072 | 0.404 | 0.283 |
| H2A(4to11)K5ac1K9ac1 | H2AK5K9 | −0.144 | 0.038 | 0.105 | 0.050 | 0.032 |
| H2A(12to17)ac0 | H2AK13K15 | −0.303 | 0.015 | 0.288 | 0.419 | 0.098 |
| H2A(12to17)K13ac1 | H2AK13K15 | −0.224 | 0.106 | 0.118 | 0.266 | 0.188 |
| H2A(12to17)K15ac1 | H2AK13K15 | −0.275 | 0.085 | 0.190 | 0.197 | 0.069 |
| H3K4me0 | H3K4 | −0.084 | 0.072 | 0.011 | 0.514 | 0.304 |
| H3K4me1 | H3K4 | −0.057 | 0.092 | −0.035 | 0.290 | −0.097 |
| H3K4me2 | H3K4 | −0.032 | 0.111 | −0.079 | −0.102 | −0.348 |
| H3K4me3 | H3K4 | −0.063 | 0.126 | −0.063 | −0.250 | −0.511 |
| H3K4ac1 | H3K4 | −0.090 | 0.076 | 0.013 | −0.312 | −0.255 |
| H3K9me0K14ac0 | H3K9K14 | 0.026 | −0.034 | 0.008 | 0.562 | 0.252 |
| H3K9me1K14ac0 | H3K9K14 | −0.099 | 0.010 | 0.088 | 0.608 | 0.449 |
| H3K9me2K14ac0 | H3K9K14 | −0.081 | 0.146 | −0.064 | 0.539 | 0.221 |
| H3K9me3K14ac0 | H3K9K14 | −0.058 | −0.095 | 0.153 | 0.654 | 0.429 |
| H3K9ac1K14ac0 | H3K9K14 | −0.015 | 0.085 | −0.070 | 0.168 | 0.040 |
| H3K9me0K14ac1 | H3K9K14 | 0.101 | 0.088 | −0.189 | 0.466 | 0.299 |
| H3K9me1K14ac1 | H3K9K14 | −0.049 | 0.077 | −0.029 | 0.155 | −0.105 |
| H3K9me2K14ac1 | H3K9K14 | −0.033 | 0.035 | −0.002 | 0.302 | 0.107 |
| H3K9me3K14ac1 | H3K9K14 | 0.128 | 0.134 | −0.261 | 0.299 | 0.072 |
| H3K9ac1K14ac1 | H3K9K14 | −0.031 | 0.117 | −0.086 | 0.165 | −0.068 |
| H3K9me0S10ph1K14ac0 | H3K9K14 | 0.200 | −0.191 | −0.009 | | |
| H3K9me1S10ph1K14ac0 | H3K9K14 | −0.055 | 0.117 | −0.062 | | |
| H3K9me2S10ph1K14ac0 | H3K9K14 | −0.020 | 0.085 | −0.064 | 1.301 | 0.892 |
| H3K9me3S10ph1K14ac0 | H3K9K14 | −0.133 | 0.181 | −0.048 | 0.221 | −0.240 |
| H3K9me0S10ph1K14ac1 | H3K9K14 | −0.260 | −0.069 | 0.329 | | |
| H3K9me1S10ph1K14ac1 | H3K9K14 | 0.659 | −0.195 | −0.464 | 0.290 | 0.451 |
| H3K9me2S10ph1K14ac1 | H3K9K14 | 0.064 | −0.001 | −0.063 | 1.152 | 1.012 |
| H3K18ac0K23ac0 | H3K18K23 | −0.184 | 0.181 | 0.004 | 0.588 | 0.390 |
| H3K18ac1K23ac0 | H3K18K23 | −0.101 | 0.141 | −0.040 | 0.072 | −0.084 |
| H3K18ac0K23ac1 | H3K18K23 | −0.033 | 0.260 | −0.227 | 0.340 | 0.220 |
| H3K18ac1K23ac1 | H3K18K23 | −0.120 | 0.267 | −0.147 | −0.117 | −0.266 |
| H3K27me0K36me0 | H3K27K36 | 0.051 | 0.407 | −0.458 | 0.773 | 0.453 |
| H3K27me0K36me1 | H3K27K36 | −0.001 | 0.254 | −0.253 | 0.790 | 0.340 |
| H3K27me0K36me2 | H3K27K36 | −0.157 | 0.257 | −0.100 | 0.993 | 0.589 |
| H3K27me0K36me3 | H3K27K36 | −0.060 | −0.005 | 0.066 | 0.674 | 0.666 |
| H3K27me1K36me0 | H3K27K36 | −0.017 | 0.095 | −0.079 | 0.465 | 0.173 |
| H3K27me1K36me1 | H3K27K36 | −0.127 | 0.145 | −0.019 | 0.602 | 0.263 |
| H3K27me1K36me2 | H3K27K36 | −0.075 | 0.074 | 0.000 | 0.419 | 0.139 |
| H3K27me1K36me3 | H3K27K36 | −0.060 | 0.054 | 0.006 | 0.993 | 0.569 |
| H3K27me2K36me0 | H3K27K36 | −0.173 | 0.161 | 0.012 | 0.546 | 0.373 |
| H3K27me2K36me1 | H3K27K36 | −0.033 | −0.043 | 0.076 | 0.421 | 0.245 |
| H3K27me2K36me2 | H3K27K36 | −0.028 | 0.064 | −0.036 | 0.276 | 0.140 |
| H3K27me2K36me3 | H3K27K36 | 0.146 | 0.115 | −0.261 | | |
| H3K27me3K36me0 | H3K27K36 | 0.015 | 0.097 | −0.112 | 0.496 | −0.157 |
| H3K27me3K36me1 | H3K27K36 | −0.154 | 0.272 | −0.118 | 0.452 | 0.230 |
| H3K27me3K36me2 | H3K27K36 | 0.049 | 0.072 | −0.121 | −0.102 | −0.338 |
| H3K27me3K36me3 | H3K27K36 | −0.043 | 0.132 | −0.089 | | |
| H3K27ac1K36me0 | H3K27K36 | 0.181 | | −0.181 | 0.099 | |
| H3K27ac1K36me1 | H3K27K36 | −0.364 | 0.264 | 0.100 | | |
| H3K27ac1K36me3 | H3K27K36 | 0.023 | 0.045 | −0.068 | 0.504 | 0.374 |
| H3K56me0 | H3K56 | −0.004 | 0.189 | −0.185 | 0.742 | 0.182 |
| H3K79me1 | H3K79 | −0.069 | 0.104 | −0.035 | 0.617 | 0.203 |
| H3K79me2 | H3K79 | 0.024 | −0.005 | −0.018 | 0.352 | 0.083 |

[0538] SSX-like protein sequences are only found in mammalian SSX family proteins (e.g., human SSX1-9) and members of the vertebrate-specific PRDM7/9 methyltransferases. A 34aa region of SSX (SSX aa155-188) that is highly conserved across vertebrate species of SSX (putative PFAM SSXRD domain) and is similar to that of PRDM7/9 proteins was identified (FIG. 3D). Pull-down experiments using biotinylated peptides corresponding to this region indicated it was sufficient for SSX nucleosome binding while shorter 23- (SSX aa166-188) and 24- (SSX aa165-188) residue peptides (lacking the W164 residue) failed to do so (FIG. 3E). This SSX-nucleosome interaction was specific as biotin pulldowns were outcompeted by addition of unlabeled SSX 34-residue peptide and could not be competed by a scrambled control peptide corresponding to the same SSX 34aa region (FIGS. 5C and 5G).

[0539] To define whether SSX 34-residue peptide can be used as a probe for repressive Barr bodies/polycomb bodies in cells, a peptide hybridization approach performed on methanol-fixed (non-crosslinked) IMR90 fibroblasts incubated with biotinylated SSX peptides and subsequently co-stained with the Barr body marker H2A K119Ub was implemented. Clear labeling of Barr bodies was observed, which indicated an innate ability of the SSX 34 residue region to selectively localize to repressed chromatin regions (FIG. 5D). 34aa regions corresponding to most human SSX proteins exhibited interactions with nucleosomes, while shorter SSX-like sequences found in PRDM7/9 proteins lacking the W164 and first R residues of the basic region (R167) failed to do so, indicating a newly evolved, mammalian-specific function of this full protein region (FIGS. 5E-5F). Finally, to identify residues important for nucleosome binding, a library of 34-residue SSX peptides containing alanine substitutions in either single conserved residues or alanine substitutions across the full basic and acidic regions was designed. Importantly, these experiments revealed that the core residues of the 6-aa basic region of the SSX (RLRERK (SEQ ID NO: 219)) were required as single residue and full region alanine substitutions in this region completely abrogated SSX-nucleosome binding (FIG. 3F).

[0540] To determine whether these minimal regions were sufficient for the genome-wide targeting of fully-formed, endogenous SS18-SSX-containing BAF complexes in cells, either WT SS18, SS18-SSX, or SS18 fused to a range of mutant SSX variants for lentiviral infection in to CRL7250 human fibroblasts was expressed. ChIP-seq experiments revealed that the 34aa SSX tail fused to SS18 was sufficient to achieve SS18-SSX targeting, while the 24aa fusion was unable to do so (FIGS. 3G and 6A). Notably, deletion of either the basic or the acidic conserved regions of SSX resulted in complete loss of oncogenic fusion complex targeting, indicating that both of these regions are required for SS18-SSX-specific properties. These findings were consistent with biochemical results indicating that the full 34aa tail is needed to confer tight affinity of SS18-SSX to chromatin in cells (FIG. 6B). Importantly, these changes in chromatin targeting resulted in corresponding changes in gene expression by RNA-seq, as evidenced by clustering of the transcriptional profiles of the 34-residue tail fusion with the full SS18-SSX fusion (78-aa fusion tail), while deletion of either basic or acidic conserved regions or 24aa SSX tail variants clustered with SS18 WT gene expression profiles (FIG. 3H). These findings were further corroborated using IF for SS18-SSX Barr body localization (FIG. 6C) as well as beta-galactosidase senescence assays in IMR90 fibroblasts performed across SS18-SSX and SSX (alone) variants (FIG. 6D). Finally, both SS18-SSX-78aa and -34aa minimal fusions rescued proliferation in synovial sarcoma cell lines that are well-established to be dependent on the function of SS18-SSX and bearing shRNA-mediated KD of the endogenous SS18-SSX fusion. Taken together, these data indicate that the 34aa minimal region of SSX that contains the conserved basic and acidic regions, is responsible for the maintenance of oncogenic gene expression and proliferation in SS cell lines driven by the SS18-SSX fusion oncoprotein (FIG. 3I and FIG. 6E).

### Example 4: An RLR Motif within the SSX Basic Region Competes with SMARCB1 for Nucleosome Acidic Patch Binding, Facilitating SS18-SSX-Bound BAF Complex-Mediated Chromatin Remodeling of Polycomb-Repressed Regions

[0541] Using systematic mutagenesis on the SSX 34-residue region, it was found that single residue perturbations to the basic region, which includes a Kaposi's sarcoma-associated herpesvirus (KSHV) LANA-like RLR motif, resulted in complete loss of nucleosome binding (FIG. 7A). These data indicated that this highly basic region binds directly to the H2A/H2B acidic patch of the nucleosome. To identify the specific sites involved in acidic patch engagement, reactive diazirine probes were introduced at various residues within the nucleosome acidic patch and performed photocrosslinking studies (Dao et al. (2019) Nat. Chem. Biol. doi:10.1038/s41589-019-0413-4) with SSX 34-residue peptides (FIG. 7B and FIGS. 8A-8B). Histone-SSX crosslinks were identified at several positions across the extended acidic patch region, most prominently at positions H2A E56 and H2B E113, which importantly, were substantially reduced when key RLR basic residues in SSX were mutated (FIGS. 7B-7C). To probe this further, nucleosomes containing H2A mutant variants D90N, E92K, and E113K were assembled which disrupt the integrity of the acidic patch for GST-SSX pull down experiments. Both H2A E113 and H2B E113 are important (crosslinks were made at H2B E113) for histone-SSX interaction and mutant variants disrupt the integrity of the acidic patch demonstrating that reciprocally disrupting the integrity of the acidic patch brakes SSX binding interaction. These experiments showed near complete loss of SSX binding to acidic patch-mutant nucleosomes, indicating the importance of this highly conserved and important docking site for the SSX-chromatin interaction (FIG. 7D (homotypic) and FIG. 8C (heterotypic)). These results were further corroborated by the fact that direct nucleosome binding competition between LANA peptide and SSX was observed (FIG. 7E and FIG. 8G), as the LANA peptide is well-established to bind the nucleosome acidic patch (Barbera et al. (2006) Science 311:856-861). Notably, solution NMR studies coupled with TALOS secondary structure prediction indicated that the SSX 78aa tail protein has a disordered N-terminal region (aa 110-154) followed by a predicted alpha helical region spanning the conserved stretch of basic amino acids, WTHRLRERKQ (SEQ ID NO: 230) (FIG. 7F and FIGS. 8D-8F). In cells, single-residue mutations within the nucleosome acidic patch binding region of SSX (SSX R169A as well as W164A) resulted in attenuation of SS18-SSX-specific BAF complex chromatin occupancy, recruitment to Barr bodies, gene expression activation, and proliferative maintenance in SS cell lines (FIGS. 7G and 9A-9G). Taken together, these data establish the role for the basic region, specifically the RLR motif, in mediating SS18-SSX-nucleosome binding, in conferring SS18-SSX-containing BAF complex chromatin binding properties, as well as function in gene expression and proliferative maintenance.

[0542] It was previously demonstrated that upon SS18-SSX expression and incorporation in to BAF complexes, the SMARCB1 (BAF47) subunit of BAF complexes, part of the core module (Mashtalir et al. (2018) Cell 175:1272-1288), is destabilized and proteasomally degraded (Kadoch and Crabtree (2013) Cell 153:71-85) (see also FIGS. 10A-10B, Tables 7A-7C). Intriguingly, using pull down competition assays, it was found that SSX competed with the recently-identified SMARCB1 C-terminal alpha helix (aa351-385) region (Valencia et al. (2019) Cell 179:1342-1356; Ye et al. (2019) Science doi:10.1126/science.aay0033) for nucleosome acidic patch binding (FIG. 7H) (Valencia et al. (2019) Cell 179:1342-1356; Ye et al. (2019) Science doi:10.1126/science.aay0033). However, the reverse was not true as the SMARCB1 C-term alpha helix was unable to outcompete SSX from binding the nucleosomes, implicating stronger affinity of SSX compared to SMARCB1 C-term for nucleosomes. This result, coupled with the positioning of SS18 at the very N-terminus SMARCA4 subunit within the core module of BAF complexes (defined by CX-MS, FIG. 10C and recent structural insights (Valencia et al. (2019) Cell 179:1342-1356; Ye et al. (2019) Science doi:10.1126/science.aay0033) and assessment of SMARCB1 levels across SS18-SSX mutant conditions (FIG. 10D) indicates the mechanism of degradation of SMARCB1 observed in SS cell lines (Kadoch and Crabtree (2013) Cell 153:71-85; McBride et al. (2018) Cancer Cell 33:1128-1141; Kohashi et al. (2010) Mod. Path. 23:981-990) can be explained by the dominant, higher affinity SSX binding to the nucleosome acidic patch and the resulting configurational changes within the BAF core module.

TABLE 7A
BAF complex components

| | Razor | | | | | | | | | |
|---|---|---|---|---|---|---|---|---|---|---|
| Protein | Peptides | Gene | Description | SeqLenn | BrgIP_Aska | BrgIP_hFib | BrgIP_293t | NSAF_BrgIP_Aska | NSAF_BrgIP_hFib | NSAF_BrgIP_293t |
| sp\|P51532\|SMCA4_HUMAN | 189 | SMARCA4 | SMCA4_HUMAN | 1647 | 50 | 39 | 100 | 0.00294971 | 0.00150089 | 0.00377919 |
| | | | Transcription | | | | | | | |
| | | | activator BRG1 | | | | | | | |
| sp\|Q92922\|SMRC1_HUMAN | 11 | SMARCC1 | SMRC1_HUMAN | 1105 | 44 | 19 | 86 | 0.00386895 | 0.00108986 | 0.00484427 |
| | | | SWI/SNF complex | | | | | | | |
| | | | subunit SMARCC1 | | | | | | | |
| sp\|Q969G3\|SMCE1_HUMAN | 96 | SMARCE1 | SMCE1_HUMAN | 411 | 39 | 21 | 36 | 0.00921988 | 0.00323859 | 0.00545196 |
| | | | SWI/SNF-related | | | | | | | |
| | | | matrix-associated | | | | | | | |
| | | | actin-dependent | | | | | | | |
| | | | regulator of | | | | | | | |
| | | | chromatin subfamily E | | | | | | | |
| | | | member 1 | | | | | | | |
| sp\|Q8TAQ2\|SMRC2_HUMAN | 136 | SMARCC2 | SMRC2_HUMAN | 1214 | 36 | 51 | 69 | 0.00288129 | 0.00266275 | 0.00353771 |
| | | | SWI/SNF complex | | | | | | | |
| | | | subunit SMARCC2 | | | | | | | |
| sp\|O14497\|ARI1A_HUMAN | 192 | ARID1A | ARI1A_HUMAN AT- | 2285 | 35 | 44 | 121 | 0.00148828 | 0.00122052 | 0.00329603 |
| | | | rich interactive | | | | | | | |
| | | | domain-containing | | | | | | | |
| | | | protein 1A | | | | | | | |
| sp\|Q8TAQ2-3\|SMRC2_HUMAN | 2 | SMARCC2 | SMRC2_HUMAN | 1152 | 33 | 50 | 55 | 0.00278333 | 0.00275103 | 0.00297168 |
| | | | Isoform 3 of SWI/SNF | | | | | | | |
| | | | complex subunit | | | | | | | |
| | | | SMARCC2 | | | | | | | |
| sp\|Q8NFD5-3\|ARI1B_HUMAN | 117 | ARID1B | ARI 1B_HUMAN | 2289 | 28 | 28 | 61 | 0.00118854 | 0.00077534 | 0.00165873 |
| | | | Isoform 3 of AT-rich | | | | | | | |
| | | | interactive domain- | | | | | | | |
| | | | containing protein 1B | | | | | | | |
| sp\|P60709\|ACTB_HUMAN | 19 | ACTB | ACTB_HUMAN Actin, | 375 | 19 | 18 | 18 | 0.00492294 | 0.00304242 | 0.00298767 |
| | | | cytoplasmic 1 | | | | | | | |
| sp\|O96019\|ACL6A_HUMAN | 55 | ACTL6A | ACL6A_HUMAN Actin- | 429 | 14 | 16 | 25 | 0.00317083 | 0.00236397 | 0.00362723 |
| | | | like protein 6A | | | | | | | |
| sp\|Q96GM5\|SMRD1_HUMAN | 30 | SMARCD1 | SMRD1_HUMAN | 515 | 14 | 6 | 18 | 0.00264133 | 0.00073845 | 0.00217549 |
| | | | SWI/SNF-related | | | | | | | |
| | | | matrix-associated | | | | | | | |
| | | | actin-dependent | | | | | | | |
| | | | regulator of | | | | | | | |
| | | | chromatin subfamily | | | | | | | |
| | | | D member 1 | | | | | | | |
| sp\|Q92925\|SMRD2_HUMAN | 42 | SMARCD2 | SMRD2_HUMAN | 531 | 12 | 9 | 21 | 0.00219578 | 0.0010743 | 0.0024616 |
| | | | SWI/SNF-related | | | | | | | |
| | | | matrix-associated | | | | | | | |
| | | | actin-dependent | | | | | | | |
| | | | regulator of | | | | | | | |
| | | | chromatin subfamily | | | | | | | |
| | | | D member 2 | | | | | | | |
| sp\|Q9NZM4\|GSCR1_HUMAN | 28 | GLTSCR1 | GSCR1_HUMAN | 1560 | 10 | 4 | 14 | 0.00062284 | 0.00016252 | 0.00055859 |
| | | | Glioma tumor | | | | | | | |
| | | | suppressor candidate | | | | | | | |
| | | | region gene 1 protein | | | | | | | |
| sp\|Q6AI39\|GSC1L_HUMAN | 0 | GLTSCR1L | GSC1L_HUMAN | 1079 | 7 | 2 | 4 | 0.00063035 | 0.00011749 | 0.00023074 |
| | | | GLTSCR 1-like protein | | | | | | | |
| sp\|Q6STE5\|SMRD3_HUMAN | 7 | SMARCD3 | SMRD3_HUMAN | 483 | 6 | 6 | 12 | 0.001207 | 0.00078738 | 0.00154641 |
| | | | SWI/SNF-related | | | | | | | |
| | | | matrix-associated | | | | | | | |
| | | | actin-dependent | | | | | | | |
| | | | regulator of | | | | | | | |
| | | | chromatin subfamily | | | | | | | |
| | | | D member 3 | | | | | | | |
| sp\|Q9H8M2\|BRD9_HUMAN | 10 | BRD9 | BRD9_HUMAN | 597 | 5 | 1 | 4 | 0.00081376 | 0.00010617 | 0.00041704 |
| | | | Bromodomain- | | | | | | | |
| | | | containing protein 9 | | | | | | | |
| sp\|Q92785\|REQU_HUMAN | 34 | DPF2 | REQU_HUMAN Zinc | 391 | 5 | 5 | 24 | 0.0012425 | 0.00081054 | 0.00382055 |
| | | | finger protein ubi-d4 | | | | | | | |
| sp\|Q12824-2\|SNF5_HUMAN | 31 | SMARCB1 | SNF5_HUMAN | 376 | 5 | 10 | 18 | 0.00129207 | 0.00134859 | 0.00297973 |
| | | | Isoform B of | | | | | | | |
| | | | SWI/SNF-related | | | | | | | |
| | | | matrix-associated | | | | | | | |
| | | | actin-dependent | | | | | | | |
| | | | regulator of | | | | | | | |
| | | | chromatin subfamily | | | | | | | |
| | | | B member 1 | | | | | | | |
| sp\|Q15532\|SSXT_HUMAN | 6 | SS18 | SSXT_HUMAN Protein | 418 | 2 | 2 | 2 | 0.0004649 | 0.00030327 | 0.00029781 |
| | | | SSXT | | | | | | | |
| sp\|Q4VC05-2\|BCL7A_HUMAN | 3 | BCL7A | BCL7A_HUMAN | 231 | 0 | 0 | 4 | 0 | 0 | 0.0010778 |
| | | | Isoform 2 of B-cell | | | | | | | |
| | | | CLL/lymphoma 7 | | | | | | | |
| | | | protein family | | | | | | | |
| | | | member A | | | | | | | |

TABLE 7B
All Spectral Counts

| | Razor | | | | | | | | | |
|---|---|---|---|---|---|---|---|---|---|---|
| Protein | Peptides | Gene | Description | SeqLen | BrgIP_Aska | BrgIP_hFib | BrgIP_293t | NSAF_BrgIP_Aska | NSAF_BrgIP_hFib | NSAF_BrgIP_293t |
| sp\|P51532\|SMCA4_HUMAN | 189 | SMARCA4 | SMCA4_HUMAN | 1647 | 50 | 39 | 100 | 0.00294971 | 0.00150089 | 0.00377919 |
| | | | Transcription activator | | | | | | | |
| | | | BRG1 | | | | | | | |
| sp\|Q92922\|SMRC1_HUMAN | 11 | SMARCC1 | SMRC1_HUMAN | 1105 | 44 | 19 | 86 | 0.00386895 | 0.00108986 | 0.00484427 |
| | | | SWI/SNF complex | | | | | | | |
| | | | subunit SMARCC1 | | | | | | | |
| sp\|Q969G3\|SMCE1_HUMAN | 96 | SMARCE1 | SMCE1_HUMAN | 411 | 39 | 21 | 36 | 0.00921988 | 0.00323859 | 0.00545196 |
| | | | SWI/SNF-related | | | | | | | |
| | | | matrix-associated | | | | | | | |
| | | | actin-dependent | | | | | | | |
| | | | regulator of chromatin | | | | | | | |
| | | | subfamily E member 1 | | | | | | | |
| sp\|P22626\|ROA2_HUMAN | 104 | HNRNPA2B1 | ROA2_HUMAN | 353 | 37 | 32 | 53 | 0.0101843 | 0.00574584 | 0.0093453 |
| | | | Heterogeneous | | | | | | | |
| | | | nuclear | | | | | | | |
| | | | ribonucleoproteins | | | | | | | |
| | | | A2/B1 | | | | | | | |
| sp\|Q8TAQ2\|SMRC2_HUMAN | 136 | SMARCC2 | SMRC2_HUMAN | 1214 | 36 | 51 | 69 | 0.00288129 | 0.00266275 | 0.00353771 |
| | | | SWI/SNF complex | | | | | | | |
| | | | subunit SMARCC2 | | | | | | | |
| sp\|O14497\|ARI1A_HUMAN | 192 | ARID1A | ARI1A_HUMAN AT-rich | 2285 | 35 | 44 | 121 | 0.00148828 | 0.00122052 | 0.00329603 |
| | | | interactive domain- | | | | | | | |
| | | | containing protein 1A | | | | | | | |
| sp\|Q8TAQ2-3\|SMRC2_HUMAN | 2 | SMARCC2 | SMRC2_HUMAN | 1152 | 33 | 50 | 55 | 0.00278333 | 0.00275103 | 0.00297168 |
| | | | Isoform 3 of SWI/SNF | | | | | | | |
| | | | complex subunit | | | | | | | |
| | | | SMARCC2 | | | | | | | |
| sp\|Q8NFD5-3\|ARI1B_HUMAN | 117 | ARID1B | ARI1B_HUMAN | 2289 | 28 | 28 | 61 | 0.00118854 | 0.000775337 | 0.00165873 |
| | | | Isoform 3 of AT-rich | | | | | | | |
| | | | interactive domain- | | | | | | | |
| | | | containing protein 1B | | | | | | | |
| sp\|P35637\|FUS_HUMAN | 53 | FUS | FUS_HUMAN RNA- | 526 | 23 | 15 | 33 | 0.00424859 | 0.00180752 | 0.00390499 |
| | | | binding protein FUS | | | | | | | |
| sp\|P78527\|PRKDC_HUMAN | 53 | PRKDC | PRKDC_HUMAN DNA- | 4128 | 23 | 13 | 22 | 0.000541366 | 0.00019961 | 0.000331722 |
| | | | dependent protein | | | | | | | |
| | | | kinase catalytic | | | | | | | |
| | | | subunit | | | | | | | |
| sp\|P60709\|ACTB_HUMAN | 19 | ACTB | ACTB_HUMAN Actin, | 375 | 19 | 18 | 18 | 0.00492294 | 0.00304242 | 0.00298767 |
| | | | cytoplasmic 1 | | | | | | | |
| sp\|P62736\|ACTA_HUMAN | 49 | ACTA2 | ACTA_HUMAN Actin, | 377 | 14 | 22 | 13 | 0.00360819 | 0.00369879 | 0.00214632 |
| | | | aortic smooth muscle | | | | | | | |
| sp\|O96019\|ACL6A_HUMAN | 55 | ACTL6A | ACL6A_HUMAN Actin- | 429 | 14 | 16 | 25 | 0.00317083 | 0.00236397 | 0.00362723 |
| | | | like protein 6A | | | | | | | |
| sp\|Q96GM5\|SMRD1_HUMAN | 30 | SMARCD1 | SMRD1_HUMAN | 515 | 14 | 6 | 18 | 0.00264133 | 0.000738452 | 0.00217549 |
| | | | SWI/SNF-related | | | | | | | |
| | | | matrix-associated | | | | | | | |
| | | | actin-dependent | | | | | | | |
| | | | regulator of chromatin | | | | | | | |
| | | | subfamily D member 1 | | | | | | | |
| sp\|P17844\|DDX5_HUMAN | 19 | DDX5 | DDX5_HUMAN | 614 | 12 | 4 | 7 | 0.00189896 | 0.000412924 | 0.000709613 |
| | | | Probable ATP- | | | | | | | |
| | | | dependent RNA | | | | | | | |
| | | | helicase DDX5 | | | | | | | |
| sp\|P02751-15\|FINC_HUMAN | 18 | FN1 | FINC_HUMAN Isoform | 2477 | 12 | 6 | 0 | 0.000470715 | 0.000153534 | 0 |
| | | | 15 of Fibronectin | | | | | | | |
| sp\|Q92925\|SMRD2_HUMAN | 42 | SMARCD2 | SMRD2_HUMAN | 531 | 12 | 9 | 21 | 0.00219578 | 0.0010743 | 0.0024616 |
| | | | SWI/SNF-related | | | | | | | |
| | | | matrix-associated | | | | | | | |
| | | | actin-dependent | | | | | | | |
| | | | regulator of chromatin | | | | | | | |
| | | | subfamily D member 2 | | | | | | | |
| sp\|P51991\|ROA3_HUMAN | 30 | HNRNPA3 | ROA3_HUMAN | 378 | 11 | 8 | 11 | 0.0028275 | 0.00134146 | 0.00181131 |
| | | | Heterogeneous | | | | | | | |
| | | | nuclear | | | | | | | |
| | | | ribonucleoprotein A3 | | | | | | | |
| sp\|Q9NZM4\|GSCR1_HUMAN | 28 | GLTSCR1 | GSCR1_HUMAN | 1560 | 10 | 4 | 14 | 0.000622842 | 0.000162523 | 0.000558593 |
| | | | Glioma tumor | | | | | | | |
| | | | suppressor candidate | | | | | | | |
| | | | region gene 1 protein | | | | | | | |
| sp\|P31942\|HNRH3_HUMAN | 54 | HNRNPH3 | HNRH3_HUMAN | 346 | 8 | 22 | 24 | 0.00224655 | 0.00403019 | 0.00431745 |
| | | | Heterogeneous | | | | | | | |
| | | | nuclear | | | | | | | |
| | | | ribonucleoprotein H3 | | | | | | | |
| sp\|Q9Y3I0\|RTCB_HUMAN | 9 | RTCB | RTCB_HUMAN tRNA- | 505 | 8 | 12 | 9 | 0.00153922 | 0.00150615 | 0.00110928 |
| | | | splicing ligase RtcB | | | | | | | |
| | | | homolog | | | | | | | |
| sp\|Q92841\|DDX17_HUMAN | 16 | DDX17 | DDX17_HUMAN | 729 | 7 | 4 | 5 | 0.000932981 | 0.000347785 | 0.000426908 |
| | | | Probable ATP- | | | | | | | |
| | | | dependent RNA | | | | | | | |
| | | | helicase DDX17 | | | | | | | |
| sp\|O00571\|DDX3X_HUMAN | 20 | DDX3X | DDX3X_HUMAN ATP- | 662 | 7 | 6 | 8 | 0.00102741 | 0.000574476 | 0.000752184 |
| | | | dependent RNA | | | | | | | |
| | | | helicase DDX3X | | | | | | | |
| sp\|Q6AI39\|GSC1L_HUMAN | 0 | GLTSCR1L | GSC1L_HUMAN | 1079 | 7 | 2 | 4 | 0.000630346 | 0.000117486 | 0.000230744 |
| | | | GLTSCR 1-like protein | | | | | | | |
| sp\|Q00839\|HNRPU_HUMAN | 33 | HNRNPU | HNRPU_HUMAN | 825 | 7 | 6 | 21 | 0.000824416 | 0.000460973 | 0.00158437 |
| | | | Heterogeneous | | | | | | | |
| | | | nuclear | | | | | | | |
| | | | ribonucleoprotein U | | | | | | | |
| sp\|Q99729-2\|ROAA_HUMAN | 17 | HNRNPAB | ROAA_HUMAN | 332 | 6 | 4 | 7 | 0.00175596 | 0.000763661 | 0.00131236 |
| | | | Isoform 2 of | | | | | | | |
| | | | Heterogeneous | | | | | | | |
| | | | nuclear | | | | | | | |
| | | | ribonucleoprotein A/B | | | | | | | |
| sp\|Q96PK6\|RBM14_HUMAN | 6 | RBM14 | RBM14_HUMAN RNA- | 669 | 6 | 11 | 14 | 0.00087142 | 0.00104219 | 0.00130255 |
| | | | binding protein 14 | | | | | | | |
| sp\|P38159\|RBMX_HUMAN | 22 | RBMX | RBMX_HUMAN RNA- | 391 | 6 | 3 | 13 | 0.001491 | 0.000486321 | 0.00206947 |
| | | | binding motif protein, | | | | | | | |
| | | | X chromosome | | | | | | | |
| sp\|Q6STE5\|SMRD3_HUMAN | 7 | SMARCD3 | SMRD3_HUMAN | 483 | 6 | 6 | 12 | 0.001207 | 0.000787377 | 0.00154641 |
| | | | SWI/SNF-related | | | | | | | |
| | | | matrix-associated | | | | | | | |
| | | | actin-dependent | | | | | | | |
| | | | regulator of chromatin | | | | | | | |
| | | | subfamily D member 3 | | | | | | | |
| sp\|Q92804\|RBP56_HUMAN | 24 | TAF15 | RBP56_HUMAN TATA- | 592 | 6 | 7 | 11 | 0.000984764 | 0.000749471 | 0.00115655 |
| | | | binding protein- | | | | | | | |
| | | | associated factor 2N | | | | | | | |
| sp\|Q9H8M2\|BRD9_HUMAN | 10 | BRD9 | BRD9_HUMAN | 597 | 5 | 1 | 4 | 0.000813763 | 0.000106171 | 0.00041704 |
| | | | Bromodomain- | | | | | | | |
| | | | containing protein 9 | | | | | | | |
| sp\|Q92785\|REQU_HUMAN | 34 | DPF2 | REQU_HUMAN Zinc | 391 | 5 | 5 | 24 | 0.0012425 | 0.000810535 | 0.00382055 |
| | | | finger protein ubi-d4 | | | | | | | |
| sp\|P09651\|ROA1_HUMAN | 9 | HNRNPA1 | ROA1_HUMAN | 372 | 5 | 4 | 9 | 0.00130596 | 0.000681546 | 0.00150588 |
| | | | Heterogeneous | | | | | | | |
| | | | nuclear | | | | | | | |
| | | | ribonucleoprotein A1 | | | | | | | |
| sp\|P11142\|HSP7C_HUMAN | 19 | HSPA8 | HSP7C_HUMAN Heat | 646 | 5 | 5 | 10 | 0.000752038 | 0.000490587 | 0.000963517 |
| | | | shock cognate 71 kDa | | | | | | | |
| | | | protein | | | | | | | |
| sp\|P38646\|GRP75_HUMAN | 12 | HSPA9 | GRP75_HUMAN | 679 | 5 | 10 | 8 | 0.000715489 | 0.000933488 | 0.000733351 |
| | | | Stress-70 protein, | | | | | | | |
| | | | mitochondrial | | | | | | | |
| sp\|Q86U86\|PB1_HUMAN | 43 | PBRM1 | PB1_HUMAN Protein | 1689 | 5 | 5 | 33 | 0.000287636 | 0.000187637 | 0.00121612 |
| | | | polybromo-1 | | | | | | | |
| sp\|Q15149\|PLEC_HUMAN | 28 | PLEC | PLEC_HUMAN Plectin | 4684 | 5 | 23 | 0 | 0.000103718 | 0.000311236 | 0 |
| sp\|Q12824-2\|SNF5_HUMAN | 31 | SMARCB1 | SNF5_HUMAN | 376 | 5 | 10 | 18 | 0.00129207 | 0.00134859 | 0.00297973 |
| | | | Isoform B of SWI/SNF- | | | | | | | |
| | | | related matrix- | | | | | | | |
| | | | associated actin- | | | | | | | |
| | | | dependent regulator | | | | | | | |
| | | | of chromatin | | | | | | | |
| | | | subfamily B member 1 | | | | | | | |
| sp\|P68371\|TBB4B_HUMAN | 5 | TUBB4B | TBB4B_HUMAN | 445 | 5 | 4 | 8 | 0.00109172 | 0.000569742 | 0.00111898 |
| | | | Tubulin beta-4B chain | | | | | | | |
| sp\|P07900-2\|HS90A_HUMAN | 10 | HSP90AA1 | HS90A_HUMAN | 854 | 4 | 4 | 2 | 0.000455098 | 0.00029688 | 0.000145769 |
| | | | Isoform 2 of Heat | | | | | | | |
| | | | shock protein HSP 90- | | | | | | | |
| | | | alpha | | | | | | | |
| sp\|P07437\|TBB5_HUMAN | 4 | TUBB | TBB5_HUMAN Tubulin | 444 | 4 | 5 | 11 | 0.000875345 | 0.000713782 | 0.00154206 |
| | | | beta chain | | | | | | | |
| sp\|Q9NWB6-2\|ARGL1_HUMAN | 4 | ARGLU1 | ARGL1_HUMAN | 273 | 3 | 0 | 1 | 0.00106773 | 0 | 0.000227997 |
| | | | Isoform 2 of Arginine | | | | | | | |
| | | | and glutamate-rich | | | | | | | |
| | | | protein 1 | | | | | | | |
| sp\|P02452\|CO1A1_HUMAN | 4 | COL1A1 | CO1A1_HUMAN | 1464 | 3 | 9 | 7 | 0.000199105 | 0.000389655 | 0.000297611 |
| | | | Collagen alpha-1(I) | | | | | | | |
| | | | chain | | | | | | | |
| sp\|P55084\|ECHB_HUMAN | 8 | HADHB | ECHB_HUMAN | 474 | 3 | 5 | 0 | 0.000614958 | 0.000668606 | 0 |
| | | | Trifunctional enzyme | | | | | | | |
| | | | subunit beta, | | | | | | | |
| | | | mitochondrial | | | | | | | |
| sp\|Q13151\|ROA0_HUMAN | 0 | HNRNPA0 | ROA0_HUMAN | 305 | 3 | 0 | 4 | 0.000955705 | 0 | 0.000816304 |
| | | | Heterogeneous | | | | | | | |
| | | | nuclear | | | | | | | |
| | | | ribonucleoprotein A0 | | | | | | | |
| sp\|Q9BUJ2\|HNRL1_HUMAN | 9 | HNRNPUL1 | HNRL1_HUMAN | 856 | 3 | 4 | 2 | 0.000340526 | 0.000296186 | 0.000145428 |
| | | | Heterogeneous | | | | | | | |
| | | | nuclear | | | | | | | |
| | | | ribonucleoprotein U- | | | | | | | |
| | | | like protein 1 | | | | | | | |
| sp\|Q12906-7\|ILF3_HUMAN | 18 | ILF3 | ILF3_HUMAN Isoform | 898 | 3 | 9 | 6 | 0.000324599 | 0.00063525 | 0.000415879 |
| | | | 7 of Interleukin | | | | | | | |
| | | | enhancer-binding | | | | | | | |
| | | | factor 3 | | | | | | | |
| sp\|Q9Y2W1\|TR150_HUMAN | 0 | THRAP3 | TR150_HUMAN | 955 | 3 | 1 | 4 | 0.000305225 | 6.63705E−05 | 0.000260704 |
| | | | Thyroid hormone | | | | | | | |
| | | | receptor-associated | | | | | | | |
| | | | protein 3 | | | | | | | |
| sp\|Q13509\|TBB3_HUMAN | 15 | TUBB3 | TBB3_HUMAN Tubulin | 450 | 3 | 5 | 7 | 0.000647756 | 0.000704265 | 0.000968228 |
| | | | beta-3 chain | | | | | | | |
| sp\|Q09666\|AHNK_HUMAN | 0 | AHNAK | AHNK_HUMAN | 5890 | 2 | 36 | 0 | 3.29926E−05 | 0.000387405 | 0 |
| | | | Neuroblast | | | | | | | |
| | | | differentiation- | | | | | | | |
| | | | associated protein | | | | | | | |
| | | | AHNAK | | | | | | | |
| sp\|P25705\|ATPA_HUMAN | 3 | ATP5A1 | ATPA_HUMAN ATP | 553 | 2 | 1 | 0 | 0.000351405 | 0.000114618 | 0 |
| | | | synthase subunit | | | | | | | |
| | | | alpha, mitochondrial | | | | | | | |
| sp\|Q9NPI1-2\|BRD7_HUMAN | 4 | BRD7 | BRD7_HUMAN Isoform | 652 | 2 | 0 | 2 | 0.000298047 | 0 | 0.00019093 |
| | | | 2 of Bromodomain- | | | | | | | |
| | | | containing protein 7 | | | | | | | |
| sp\|Q9Y224\|CN166_HUMAN | 3 | C14orf166 | CN166_HUMAN | 244 | 2 | 3 | 1 | 0.000796421 | 0.000779309 | 0.000255095 |
| | | | UPF0568 protein | | | | | | | |
| | | | C14orf166 | | | | | | | |
| sp\|Q92499\|DDX1_HUMAN | 0 | DDX1 | DDX1_HUMAN ATP- | 740 | 2 | 6 | 7 | 0.000262604 | 0.000513923 | 0.000588787 |
| | | | dependent RNA | | | | | | | |
| | | | helicase DDX1 | | | | | | | |
| sp\|Q9UJV9\|DDX41_HUMAN | 6 | DDX41 | DDX41_HUMAN | 622 | 2 | 3 | 1 | 0.000312422 | 0.00030571 | 0.000100069 |
| | | | Probable ATP- | | | | | | | |
| | | | dependent RNA | | | | | | | |
| | | | helicase DDX41 | | | | | | | |
| sp\|Q14103\|HNRPD_HUMAN | 8 | HNRNPD | HNRPD_HUMAN | 355 | 2 | 3 | 3 | 0.000547399 | 0.000535638 | 0.000525999 |
| | | | Heterogeneous | | | | | | | |
| | | | nuclear | | | | | | | |
| | | | ribonucleoprotein D0 | | | | | | | |
| sp\|O14979\|HNRDL_HUMAN | 8 | HNRNPDL | HNRDL_HUMAN | 420 | 2 | 3 | 3 | 0.000462683 | 0.000452742 | 0.000444594 |
| | | | Heterogeneous | | | | | | | |
| | | | nuclear | | | | | | | |
| | | | ribonucleoprotein D- | | | | | | | |
| | | | like | | | | | | | |
| sp\|P31943\|HNRH1_HUMAN | 11 | HNRNPH1 | HNRH1_HUMAN | 449 | 2 | 6 | 7 | 0.000432799 | 0.000847 | 0.000970384 |
| | | | Heterogeneous | | | | | | | |
| | | | nuclear | | | | | | | |
| | | | ribonucleoprotein H | | | | | | | |
| sp\|Q1KMD3\|HNRL2_HUMAN | 6 | HNRNPUL2 | HNRL2_HUMAN | 747 | 2 | 4 | 1 | 0.000260143 | 0.000339405 | 8.33242E−05 |
| | | | Heterogeneous | | | | | | | |
| | | | nuclear | | | | | | | |
| | | | ribonucleoprotein U- | | | | | | | |
| | | | like protein 2 | | | | | | | |
| sp\|P11021\|GRP78_HUMAN | 0 | HSPA5 | GRP78_HUMAN 78 | 654 | 2 | 5 | 1 | 0.000297136 | 0.000484586 | 9.51731E−05 |
| | | | kDa glucose-regulated | | | | | | | |
| | | | protein | | | | | | | |
| sp\|B9A064\|IGLL5_HUMAN | 2 | IGLL5 | IGLL5_HUMAN | 214 | 2 | 4 | 8 | 0.000908069 | 0.00118474 | 0.00232685 |
| | | | Immunoglobulin | | | | | | | |
| | | | lambda-like | | | | | | | |
| | | | polypeptide 5 | | | | | | | |
| sp\|Q13523\|PRP4B_HUMAN | 3 | PRPF4B | PRP4B_HUMAN | 1007 | 2 | 0 | 1 | 0.000192976 | 0 | 6.18105E−05 |
| | | | Serine/threonine- | | | | | | | |
| | | | protein kinase PRP4 | | | | | | | |
| | | | homolog | | | | | | | |
| sp\|P62913\|RL11_HUMAN | 5 | RPL11 | RL11_HUMAN 60S | 178 | 2 | 1 | 2 | 0.00109172 | 0.000356089 | 0.000699362 |
| | | | ribosomal protein L11 | | | | | | | |
| sp\|P40429\|RL13A_HUMAN | 5 | RPL13A | RL13A_HUMAN 60S | 203 | 2 | 1 | 2 | 0.000957274 | 0.000312236 | 0.000613233 |
| | | | ribosomal protein L13a | | | | | | | |
| sp\|P15880\|RS2_HUMAN | 6 | RPS2 | RS2_HUMAN 40S | 293 | 2 | 3 | 1 | 0.000663231 | 0.000648981 | 0.000212434 |
| | | | ribosomal protein S2 | | | | | | | |
| sp\|P05141\|ADT2_HUMAN | 0 | SLC25A5 | ADT2_HUMAN | 298 | 2 | 2 | 2 | 0.000652103 | 0.000425395 | 0.00041774 |
| | | | ADP/ATP translocase 2 | | | | | | | |
| sp\|Q15532\|SSXT_HUMAN | 6 | SS18 | SSXT_HUMAN Protein | 418 | 2 | 2 | 2 | 0.000464896 | 0.000303272 | 0.000297814 |
| | | | SSXT | | | | | | | |
| sp\|Q13263\|TIF1B_HUMAN | 5 | TRIM28 | TIF1B_HUMAN | 835 | 2 | 1 | 2 | 0.000232727 | 7.59088E−05 | 0.000149086 |
| | | | Transcription | | | | | | | |
| | | | intermediary factor 1- | | | | | | | |
| | | | beta | | | | | | | |
| sp\|Q9UHD8\|SEPT9_HUMAN | 2 | 9-Sep | SEPT9_HUMAN Septin- | 586 | 1 | 1 | 0 | 0.000165808 | 0.000108164 | 0 |
| | | | 9 | | | | | | | |
| sp\|Q68CP9\|ARID2_HUMAN | 15 | ARID2 | ARID2_HUMAN AT- | 1835 | 1 | 1 | 13 | 5.29501E−05 | 3.45416E−05 | 0.00044096 |
| | | | rich interactive | | | | | | | |
| | | | domain-containing | | | | | | | |
| | | | protein 2 | | | | | | | |
| sp\|Q8WUZ0-2\|BCL7C_HUMAN | 8 | BCL7C | BCL7C_HUMAN | 242 | 1 | 0 | 7 | 0.000401501 | 0 | 0.00180042 |
| | | | Isoform 2 of B-cell | | | | | | | |
| | | | CLL/lymphoma 7 | | | | | | | |
| | | | protein family member | | | | | | | |
| | | | C | | | | | | | |
| sp\|P02461\|CO3A1_HUMAN | 1 | COL3A1 | CO3A1_HUMAN | 1466 | 1 | 1 | 1 | 6.62779E−05 | 4.32359E−05 | 4.24578E−05 |
| | | | Collagen alpha-1(III) | | | | | | | |
| | | | chain | | | | | | | |
| sp\|P27658\|CO8A1_HUMAN | 0 | COL8A1 | CO8A1_HUMAN | 744 | 1 | 0 | 0 | 0.000130596 | 0 | 0 |
| | | | Collagen alpha-1(VIII) | | | | | | | |
| | | | chain | | | | | | | |
| sp\|Q9Y678\|COPG1_HUMAN | 2 | COPG1 | COPG1_HUMAN | 874 | 1 | 3 | 0 | 0.000111171 | 0.000217565 | 0 |
| | | | Coatomer subunit | | | | | | | |
| | | | gamma-1 | | | | | | | |
| sp\|Q8IXB1\|DJC10_HUMAN | 3 | DNAJC10 | DJC10_HUMAN DnaJ | 793 | 1 | 2 | 0 | 0.000122526 | 0.000159858 | 0 |
| | | | homolog subfamily C | | | | | | | |
| | | | member 10 | | | | | | | |
| sp\|Q5VTE0\|EF1A3_HUMAN | 6 | EEF1A1P5 | EF1A3_HUMAN | 462 | 1 | 4 | 1 | 0.00021031 | 0.000548778 | 0.000134726 |
| | | | Putative elongation | | | | | | | |
| | | | factor 1-alpha-like 3 | | | | | | | |
| sp\|P26641\|EF1G_HUMAN | 2 | EEF1G | EF1G_HUMAN | 437 | 1 | 1 | 0 | 0.000222342 | 0.000145043 | 0 |
| | | | Elongation factor 1- | | | | | | | |
| | | | gamma | | | | | | | |
| sp\|Q01844-5\|EWS_HUMAN | 8 | EWSR1 | EWS_HUMAN Isoform | 661 | 1 | 6 | 1 | 0.000146994 | 0.000575345 | 9.41652E−05 |
| | | | 5 of RNA-binding | | | | | | | |
| | | | protein EWS | | | | | | | |
| sp\|Q8NCA5\|FA98A_HUMAN | 6 | FAM98A | FA98A_HUMAN | 519 | 1 | 4 | 1 | 0.000187213 | 0.000488507 | 0.000119929 |
| | | | Protein FAM98A | | | | | | | |
| sp\|P21333\|FLNA_HUMAN | 40 | FLNA | FLNA_HUMAN Filamin- | 2647 | 1 | 39 | 0 | 0.000036707 | 0.000933876 | 0 |
| | | | A | | | | | | | |
| sp\|Q8IY81\|SPB1_HUMAN | 0 | FTSJ3 | SPB1_HUMAN pre- | 847 | 1 | 0 | 1 | 0.000114715 | 0 | 7.34867E−05 |
| | | | rRNA processing | | | | | | | |
| | | | protein FTSJ3 | | | | | | | |
| sp\|P28799\|GRN_HUMAN | 4 | GRN | GRN_HUMAN | 593 | 1 | 2 | 1 | 0.00016385 | 0.000213773 | 0.000104963 |
| | | | Granulins | | | | | | | |
| sp\|P52597\|HNRPF_HUMAN | 0 | HNRNPF | HNRPF_HUMAN | 415 | 1 | 3 | 2 | 0.000234129 | 0.000458196 | 0.000299967 |
| | | | Heterogeneous | | | | | | | |
| | | | nuclear | | | | | | | |
| | | | ribonucleoprotein F | | | | | | | |
| sp\|P08107\|HSP71_HUMAN | 5 | HSPA1A | HSP71_HUMAN Heat | 641 | 1 | 1 | 5 | 0.000151581 | 9.88827E−05 | 0.000485516 |
| | | | shock 70 kDa protein | | | | | | | |
| | | | 1A/1B | | | | | | | |
| sp\|Q07666\|KHDR1_HUMAN | 7 | KHDRBS1 | KHDR1_HUMAN KH | 443 | 1 | 1 | 5 | 0.00021933 | 0.000143079 | 0.000702519 |
| | | | domain-containing, | | | | | | | |
| | | | RNA-binding, signal | | | | | | | |
| | | | transduction- | | | | | | | |
| | | | associated protein 1 | | | | | | | |
| sp\|P56192\|SYMC_HUMAN | 8 | MARS | SYMC_HUMAN | 900 | 1 | 4 | 3 | 0.000107959 | 0.000281706 | 0.000207477 |
| | | | Methionine--tRNA | | | | | | | |
| | | | ligase, cytoplasmic | | | | | | | |
| sp\|Q9BU76\|MMTA2_HUMAN | 2 | MMTAG2 | MMTA2_HUMAN | 263 | 1 | 0 | 1 | 0.000369442 | 0 | 0.000236666 |
| | | | Multiple myeloma | | | | | | | |
| | | | tumor-associated | | | | | | | |
| | | | protein 2 | | | | | | | |
| sp\|P09874\|PARP1_HUMAN | 0 | PARP1 | PARP1_HUMAN Poly | 1014 | 1 | 2 | 1 | 9.58218E−05 | 0.000125017 | 6.13838E−05 |
| | | | [ADP-ribose] | | | | | | | |
| | | | polymerase 1 | | | | | | | |
| sp\|Q9NR12\|PDLI7_HUMAN | 16 | PDLIM7 | PDLI7_HUMAN PDZ | 457 | 1 | 15 | 0 | 0.000212611 | 0.00208043 | 0 |
| | | | and LIM domain | | | | | | | |
| | | | protein 7 | | | | | | | |
| sp\|Q8WUB8\|PHF10_HUMAN | 2 | PHF10 | PHF10_HUMAN PHD | 498 | 1 | 0 | 1 | 0.000195107 | 0 | 0.000124986 |
| | | | finger protein 10 | | | | | | | |
| sp\|Q14498\|RBM39_HUMAN | 2 | RBM39 | RBM39_HUMAN RNA- | 530 | 1 | 0 | 1 | 0.000183327 | 0 | 0.00011744 |
| | | | binding protein 39 | | | | | | | |
| sp\|P27635\|RL10_HUMAN | 2 | RPL10 | RL10_HUMAN 60S | 214 | 1 | 0 | 1 | 0.000454034 | 0 | 0.000290856 |
| | | | ribosomal protein L10 | | | | | | | |
| sp\|P18621-3\|RL17_HUMAN | 1 | RPL17 | RL17_HUMAN Isoform | 228 | 1 | 0 | 0 | 0.000426155 | 0 | 0 |
| | | | 3 of 60S ribosomal | | | | | | | |
| | | | protein L17 | | | | | | | |
| sp\|P83731\|RL24_HUMAN | 4 | RPL24 | RL24_HUMAN 60S | 157 | 1 | 1 | 2 | 0.000618875 | 0.000403719 | 0.000792907 |
| | | | ribosomal protein L24 | | | | | | | |
| sp\|P46776\|RL27A_HUMAN | 3 | RPL27A | RL27A_HUMAN 60S | 148 | 1 | 1 | 1 | 0.000656509 | 0.000428269 | 0.000420569 |
| | | | ribosomal protein L27a | | | | | | | |
| sp\|P62424\|RL7A_HUMAN | 4 | RPL7A | RL7A_HUMAN 60S | 266 | 1 | 1 | 2 | 0.000365276 | 0.000238285 | 0.000467994 |
| | | | ribosomal protein L7a | | | | | | | |
| sp\|P62269\|RS18_HUMAN | 2 | RPS18 | RS18_HUMAN 40S | 152 | 1 | 0 | 2 | 0.000639233 | 0 | 0.000818989 |
| | | | ribosomal protein S18 | | | | | | | |
| sp\|P62753\|RS6_HUMAN | 3 | RPS6 | RS6_HUMAN 40S | 249 | 1 | 1 | 1 | 0.000390214 | 0.000254554 | 0.000249973 |
| | | | ribosomal protein S6 | | | | | | | |
| sp\|Q9Y265\|RUVB1_HUMAN | 2 | RUVBL1 | RUVB1_HUMAN RuvB- | 456 | 1 | 0 | 1 | 0.000213078 | 0 | 0.000136498 |
| | | | like 1 | | | | | | | |
| sp\|Q9Y230\|RUVB2_HUMAN | 4 | RUVBL2 | RUVB2_HUMAN RuvB- | 463 | 1 | 0 | 3 | 0.000209856 | 0 | 0.000403304 |
| | | | like 2 | | | | | | | |
| sp\|P12236\|ADT3_HUMAN | 4 | SLC25A6 | ADT3_HUMAN | 298 | 1 | 2 | 1 | 0.000326051 | 0.000425395 | 0.00020887 |
| | | | ADP/ATP translocase 3 | | | | | | | |
| sp\|Q13242\|SRSF9_HUMAN | 6 | SRSF9 | SRSF9_HUMAN | 221 | 1 | 2 | 3 | 0.000439653 | 0.000573609 | 0.00084493 |
| | | | Serine/arginine-rich | | | | | | | |
| | | | splicing factor 9 | | | | | | | |
| sp\|O75177\|CREST_HUMAN | 0 | SS18L1 | CREST_HUMAN | 396 | 1 | 0 | 1 | 0.000245362 | 0 | 0.00015718 |
| | | | Calcium-responsive | | | | | | | |
| | | | transactivator | | | | | | | |
| sp\|P51571\|SSRD_HUMAN | 3 | SSR4 | SSRD_HUMAN | 173 | 1 | 3 | 0 | 0.000561638 | 0.00109914 | 0 |
| | | | Translocon-associated | | | | | | | |
| | | | protein subunit delta | | | | | | | |
| sp\|P68363\|TBA1B_HUMAN | 15 | TUBA1B | TBA1B_HUMAN | 451 | 1 | 5 | 9 | 0.00021544 | 0.000702703 | 0.0012421 |
| | | | Tubulin alpha-1B chain | | | | | | | |
| sp\|P10599\|THIO_HUMAN | 3 | TXN | THIO_HUMAN | 105 | 1 | 1 | 1 | 0.000925365 | 0.000603655 | 0.000592792 |
| | | | Thioredoxin | | | | | | | |
| sp\|Q6NZY4\|ZCHC8_HUMAN | 2 | ZCCHC8 | ZCHC8_HUMAN Zinc | 707 | 1 | 1 | 0 | 0.00013743 | 8.96518E−05 | 0 |
| | | | finger CCHC domain- | | | | | | | |
| | | | containing protein 8 | | | | | | | |
| ##sp\|Q6L8G9\|KRA56_HUMAN | 0 | ##KRTAP5-6 | ##KRA56_HUMAN | 129 | 0 | 0 | 1 | 0 | 0 | 0.000482505 |
| | | | ##Keratin-associated | | | | | | | |
| | | | protein 5-6 | | | | | | | |
| sp\|A8K2U0\|A2ML1_HUMAN | 0 | A2ML1 | A2ML1_HUMAN | 1454 | 0 | 2 | 0 | 0 | 8.71854E−05 | 0 |
| | | | Alpha-2- | | | | | | | |
| | | | macroglobulin-like | | | | | | | |
| | | | protein 1 | | | | | | | |
| sp\|P12814-4\|ACTN1_HUMAN | 2 | ACTN1 | ACTN1_HUMAN | 930 | 0 | 2 | 0 | 0 | 0.000136309 | 0 |
| | | | Isoform 4 of Alpha- | | | | | | | |
| | | | actinin-1 | | | | | | | |
| sp\|O43707\|ACTN4_HUMAN | 2 | ACTN4 | ACTN4_HUMAN | 911 | 0 | 2 | 0 | 0 | 0.000139152 | 0 |
| | | | Alpha-actinin-4 | | | | | | | |
| sp\|O95831\|AIFM1_HUMAN | 2 | AIFM1 | AIFM1_HUMAN | 613 | 0 | 1 | 1 | 0 | 0.000103399 | 0.000101539 |
| | | | Apoptosis-inducing | | | | | | | |
| | | | factor 1, mitochondrial | | | | | | | |
| sp\|Q86V81\|THOC4_HUMAN | 1 | ALYREF | THOC4_HUMAN THO | 257 | 0 | 0 | 1 | 0 | 0 | 0.000242191 |
| | | | complex subunit 4 | | | | | | | |
| sp\|P15144\|AMPN_HUMAN | 2 | ANPEP | AMPN_HUMAN | 967 | 0 | 6 | 0 | 0 | 0.000393281 | 0 |
| | | | Aminopeptidase N | | | | | | | |
| sp\|P06576\|ATPB_HUMAN | 1 | ATP5B | ATPB_HUMAN ATP | 529 | 0 | 1 | 0 | 0 | 0.000119818 | 0 |
| | | | synthase subunit beta, | | | | | | | |
| | | | mitochondrial | | | | | | | |
| sp\|Q4VC05-2\|BCL7A_HUMAN | 3 | BCL7A | BCL7A_HUMAN | 231 | 0 | 0 | 4 | 0 | 0 | 0.0010778 |
| | | | Isoform 2 of B-cell | | | | | | | |
| | | | CLL/lymphoma 7 | | | | | | | |
| | | | protein family member | | | | | | | |
| | | | A | | | | | | | |
| sp\|Q9NYF8\|BCLF1_HUMAN | 3 | BCLAF1 | BCLF1_HUMAN Bcl-2- | 920 | 0 | 0 | 3 | 0 | 0 | 0.000202967 |
| | | | associated | | | | | | | |
| | | | transcription factor 1 | | | | | | | |
| sp\|Q96MY1\|CT112_HUMAN | 1 | C20orf112 | CT112_HUMAN | 436 | 0 | 1 | 0 | 0 | 0.000145376 | 0 |
| | | | Uncharacterized | | | | | | | |
| | | | protein C20orf112 | | | | | | | |
| sp\|Q05682\|CALD1_HUMAN | 4 | CALD1 | CALD1_HUMAN | 793 | 0 | 4 | 0 | 0 | 0.000319717 | 0 |
| | | | Caldesmon | | | | | | | |
| sp\|O43852-3\|CALU_HUMAN | 1 | CALU | CALU_HUMAN Isoform | 323 | 0 | 1 | 0 | 0 | 0.000196235 | 0 |
| | | | 3 of Calumenin | | | | | | | |
| sp\|Q14444\|CAPR1_HUMAN | 1 | CAPRIN1 | CAPR1_HUMAN | 709 | 0 | 0 | 1 | 0 | 0 | 8.77901E−05 |
| | | | Caprin-1 | | | | | | | |
| sp\|Q76M96-2\|CCD80_HUMAN | 3 | CCDC80 | CCD80_HUMAN | 961 | 0 | 3 | 0 | 0 | 0.000197868 | 0 |
| | | | Isoform 2 of Coiled-coil | | | | | | | |
| | | | domain-containing | | | | | | | |
| | | | protein 80 | | | | | | | |
| sp\|Q15517\|CDSN_HUMAN | 3 | CDSN | CDSN_HUMAN | 529 | 0 | 3 | 0 | 0 | 0.000359455 | 0 |
| | | | Corneodesmosin | | | | | | | |
| sp\|Q07065\|CKAP4_HUMAN | 0 | CKAP4 | CKAP4_HUMAN | 602 | 0 | 5 | 0 | 0 | 0.000526444 | 0 |
| | | | Cytoskeleton- | | | | | | | |
| | | | associated protein 4 | | | | | | | |
| sp\|Q00610\|CLH1_HUMAN | 2 | CLTC | CLH1_HUMAN Clathrin | 1675 | 0 | 2 | 0 | 0 | 7.56822E−05 | 0 |
| | | | heavy chain 1 | | | | | | | |
| sp\|P51911\|CNN1_HUMAN | 2 | CNN1 | CNN1_HUMAN | 297 | 0 | 2 | 0 | 0 | 0.000426827 | 0 |
| | | | Calponin-1 | | | | | | | |
| sp\|Q15417\|CNN3_HUMAN | 3 | CNN3 | CNN3_HUMAN | 329 | 0 | 3 | 0 | 0 | 0.000577968 | 0 |
| | | | Calponin-3 | | | | | | | |
| sp\|Q99715\|COCA1_HUMAN | 8 | COL12A1 | COCA1_HUMAN | 3063 | 0 | 8 | 0 | 0 | 0.000165547 | 0 |
| | | | Collagen alpha-1(XII) | | | | | | | |
| | | | chain | | | | | | | |
| sp\|P08123\|CO1A2_HUMAN | 0 | COL1A2 | CO1A2_HUMAN | 1366 | 0 | 1 | 4 | 0 | 0.000046401 | 0.000182264 |
| | | | Collagen alpha-2(I) | | | | | | | |
| | | | chain | | | | | | | |
| sp\|P53618\|COPB_HUMAN | 4 | COPB1 | COPB_HUMAN | 953 | 0 | 7 | 0 | 0 | 0.000465568 | 0 |
| | | | Coatomer subunit beta | | | | | | | |
| sp\|Q9BZJ0\|CRNL1_HUMAN | 1 | CRNKL1 | CRNL1_HUMAN | 848 | 0 | 0 | 1 | 0 | 0 | 0.0000734 |
| | | | Crooked neck-like | | | | | | | |
| | | | protein 1 | | | | | | | |
| sp\|O00622\|CYR61_HUMAN | 0 | CYR61 | CYR61_HUMAN | 381 | 0 | 1 | 0 | 0 | 0.000166362 | 0 |
| | | | Protein CYR61 | | | | | | | |
| sp\|Q16531\|DDB1_HUMAN | 2 | DDB1 | DDB1_HUMAN DNA | 1140 | 0 | 2 | 0 | 0 | 0.0001112 | 0 |
| | | | damage-binding | | | | | | | |
| | | | protein 1 | | | | | | | |
| sp\|O43143\|DHX15_HUMAN | 0 | DHX15 | DHX15_HUMAN | 795 | 0 | 0 | 2 | 0 | 0 | 0.000156587 |
| | | | Putative pre-mRNA- | | | | | | | |
| | | | splicing factor ATP- | | | | | | | |
| | | | dependent RNA | | | | | | | |
| | | | helicase DHX15 | | | | | | | |
| sp\|Q08211\|DHX9_HUMAN | 1 | DHX9 | DHX9_HUMAN ATP- | 1270 | 0 | 0 | 7 | 0 | 0 | 0.000343073 |
| | | | dependent RNA | | | | | | | |
| | | | helicase A | | | | | | | |
| sp\|Q14204\|DYHC1_HUMAN | 0 | DYNC1H1 | DYHC1_HUMAN | 4646 | 0 | 3 | 0 | 0 | 0.000040928 | 0 |
| | | | Cytoplasmic dynein 1 | | | | | | | |
| | | | heavy chain 1 | | | | | | | |
| sp\|Q99848\|EBP2_HUMAN | 1 | EBNA1BP2 | EBP2_HUMAN | 306 | 0 | 0 | 1 | 0 | 0 | 0.000203409 |
| | | | Probable rRNA- | | | | | | | |
| | | | processing protein | | | | | | | |
| | | | EBP2 | | | | | | | |
| sp\|P00533\|EGFR_HUMAN | 1 | EGFR | EGFR_HUMAN | 1210 | 0 | 1 | 0 | 0 | 5.23833E−05 | 0 |
| | | | Epidermal growth | | | | | | | |
| | | | factor receptor | | | | | | | |
| sp\|P50402\|EMD_HUMAN | 1 | EMD | EMD_HUMAN Emerin | 254 | 0 | 1 | 0 | 0 | 0.000249543 | 0 |
| sp\|PO7814\|SYEP_HUMAN | 0 | EPRS | SYEP_HUMAN | 1512 | 0 | 2 | 1 | 0 | 0.000083841 | 4.11661E−05 |
| | | | Bifunctional | | | | | | | |
| | | | glutamate/proline-- | | | | | | | |
| | | | tRNA ligase | | | | | | | |
| sp\|Q9NZB2-6\|F120A_HUMAN | 4 | FAM120A | F120A_HUMAN | 1146 | 0 | 4 | 0 | 0 | 0.000221235 | 0 |
| | | | Isoform F of | | | | | | | |
| | | | Constitutive | | | | | | | |
| | | | coactivator of PPAR- | | | | | | | |
| | | | gamma-like protein 1 | | | | | | | |
| sp\|Q8WVX9\|FACR1_HUMAN | 1 | FAR1 | FACR1_HUMAN Fatty | 515 | 0 | 1 | 0 | 0 | 0.000123075 | 0 |
| | | | acyl-CoA reductase 1 | | | | | | | |
| sp\|Q9Y4F1-2\|FARP1_HUMAN | 3 | FARP1 | FARP1_HUMAN | 1076 | 0 | 3 | 0 | 0 | 0.000176721 | 0 |
| | | | Isoform 2 of FERM, | | | | | | | |
| | | | RhoGEF and pleckstrin | | | | | | | |
| | | | domain-containing | | | | | | | |
| | | | protein 1 | | | | | | | |
| sp\|P22087\|FBRL_HUMAN | 2 | FBL | FBRL_HUMAN rRNA 2′- | 321 | 0 | 0 | 2 | 0 | 0 | 0.000387808 |
| | | | O-methyltransferase | | | | | | | |
| | | | fibrillarin | | | | | | | |
| sp\|Q14315\|FLNC_HUMAN | 9 | FLNC | FLNC_HUMAN Filamin- | 2725 | 0 | 9 | 0 | 0 | 0.000209341 | 0 |
| | | | C | | | | | | | |
| sp\|P04899-4\|GNAI2_HUMAN | 9 | GNAI2 | GNAI2_HUMAN | 366 | 0 | 9 | 0 | 0 | 0.00155862 | 0 |
| | | | Isoform sGi2 of | | | | | | | |
| | | | Guanine nucleotide- | | | | | | | |
| | | | binding protein G(i) | | | | | | | |
| | | | subunit alpha-2 | | | | | | | |
| sp\|Q9BVP2\|GNL3_HUMAN | 3 | GNL3 | GNL3_HUMAN | 549 | 0 | 0 | 3 | 0 | 0 | 0.000340127 |
| | | | Guanine nucleotide- | | | | | | | |
| | | | binding protein-like 3 | | | | | | | |
| sp\|P62805\|H4_HUMAN | 0 | HIST1H4A | H4_HUMAN Histone | 103 | 0 | 1 | 0 | 0 | 0.000615377 | 0 |
| | | | H4 | | | | | | | |
| sp\|P55795\|HNRH2_HUMAN | 4 | HNRNPH2 | HNRH2_HUMAN | 449 | 0 | 3 | 3 | 0 | 0.0004235 | 0.000415879 |
| | | | Heterogeneous | | | | | | | |
| | | | nuclear | | | | | | | |
| | | | ribonucleoprotein H2 | | | | | | | |
| sp\|P61978-2\|HNRPK_HUMAN | 1 | HNRNPK | HNRPK_HUMAN | 464 | 0 | 0 | 1 | 0 | 0 | 0.000134145 |
| | | | Isoform 2 of | | | | | | | |
| | | | Heterogeneous | | | | | | | |
| | | | nuclear | | | | | | | |
| | | | ribonucleoprotein K | | | | | | | |
| sp\|P14866\|HNRPL_HUMAN | 1 | HNRNPL | HNRPL_HUMAN | 589 | 0 | 0 | 1 | 0 | 0 | 0.000105676 |
| | | | Heterogeneous | | | | | | | |
| | | | nuclear | | | | | | | |
| | | | ribonucleoprotein L | | | | | | | |
| sp\|P08238\|HS90B_HUMAN | 2 | HSP90AB1 | HS90B_HUMAN Heat | 724 | 0 | 1 | 1 | 0 | 8.75467E−05 | 8.59713E−05 |
| | | | shock protein HSP 90- | | | | | | | |
| | | | beta | | | | | | | |
| sp\|P01857\|IGHG1_HUMAN | 0 | IGHG1 | IGHG1_HUMAN Ig | 330 | 0 | 1 | 1 | 0 | 0.000192072 | 0.000188616 |
| | | | gamma-1 chain C | | | | | | | |
| | | | region | | | | | | | |
| sp\|Q12905\|ILF2_HUMAN | 0 | ILF2 | ILF2_HUMAN | 390 | 0 | 0 | 1 | 0 | 0 | 0.000159598 |
| | | | Interleukin enhancer- | | | | | | | |
| | | | binding factor 2 | | | | | | | |
| sp\|Q9H0H0\|INT2_HUMAN | 1 | INTS2 | INT2_HUMAN | 1204 | 0 | 0 | 1 | 0 | 0 | 0.000051697 |
| | | | Integrator complex | | | | | | | |
| | | | subunit 2 | | | | | | | |
| sp\|Q9NVH2\|INT7_HUMAN | 2 | INTS7 | INT7_HUMAN | 962 | 0 | 0 | 2 | 0 | 0 | 0.000129404 |
| | | | Integrator complex | | | | | | | |
| | | | subunit 7 | | | | | | | |
| sp\|Q9H1B7\|I2BPL_HUMAN | 0 | IRF2BPL | I2BPL_HUMAN | 796 | 0 | 1 | 0 | 0 | 7.96279E−05 | 0 |
| | | | Interferon regulatory | | | | | | | |
| | | | factor 2-binding | | | | | | | |
| | | | protein-like | | | | | | | |
| sp\|Q63ZY3-2\|KANK2_HUMAN | 2 | KANK2 | KANK2_HUMAN | 859 | 0 | 2 | 0 | 0 | 0.000147576 | 0 |
| | | | Isoform 2 of KN motif | | | | | | | |
| | | | and ankyrin repeat | | | | | | | |
| | | | domain-containing | | | | | | | |
| | | | protein 2 | | | | | | | |
| sp\|P52294\|IMA5_HUMAN | 1 | KPNA1 | IMA5_HUMAN | 538 | 0 | 1 | 0 | 0 | 0.000117814 | 0 |
| | | | Importin subunit | | | | | | | |
| | | | alpha-5 | | | | | | | |
| sp\|P52292\|IMA1_HUMAN | 1 | KPNA2 | IMA1_HUMAN | 529 | 0 | 0 | 2 | 0 | 0 | 0.000235324 |
| | | | Importin subunit | | | | | | | |
| | | | alpha-1 | | | | | | | |
| sp\|Q32P28-3\|P3H1_HUMAN | 3 | LEPRE1 | P3H1_HUMAN Isoform | 804 | 0 | 3 | 0 | 0 | 0.000236507 | 0 |
| | | | 3 of Prolyl 3- | | | | | | | |
| | | | hydroxylase 1 | | | | | | | |
| sp\|P09382\|LEG1_HUMAN | 0 | LGALS1 | LEG1_HUMAN | 135 | 0 | 2 | 0 | 0 | 0.00093902 | 0 |
| | | | Galectin-1 | | | | | | | |
| sp\|PO2545\|LMNA_HUMAN | 6 | LMNA | LMNA_HUMAN | 664 | 0 | 6 | 0 | 0 | 0.000572745 | 0 |
| | | | Prelamin-A/C | | | | | | | |
| sp\|Q8WWI1\|LMO7_HUMAN | 3 | LMO7 | LMO7_HUMAN LIM | 1683 | 0 | 3 | 0 | 0 | 0.000112984 | 0 |
| | | | domain only protein 7 | | | | | | | |
| sp\|P46821\|MAP1B_HUMAN | 0 | MAP1B | MAP1B_HUMAN | 2468 | 0 | 4 | 0 | 0 | 0.000102729 | 0 |
| | | | Microtubule- | | | | | | | |
| | | | associated protein 1B | | | | | | | |
| sp\|P27816\|MAP4_HUMAN | 1 | MAP4 | MAP4_HUMAN | 1152 | 0 | 1 | 0 | 0 | 5.50207E−05 | 0 |
| | | | Microtubule- | | | | | | | |
| | | | associated protein 4 | | | | | | | |
| sp\|P33993\|MCM7_HUMAN | 3 | MCM7 | MCM7_HUMAN DNA | 719 | 0 | 0 | 3 | 0 | 0 | 0.000259707 |
| | | | replication licensing | | | | | | | |
| | | | factor MCM7 | | | | | | | |
| sp\|P52701\|MSH6_HUMAN | 2 | MSH6 | MSH6_HUMAN DNA | 1360 | 0 | 0 | 2 | 0 | 0 | 9.15341E−05 |
| | | | mismatch repair | | | | | | | |
| | | | protein Msh6 | | | | | | | |
| sp\|P35579\|MYH9_HUMAN | 4 | MYH9 | MYH9_HUMAN | 1960 | 0 | 6 | 0 | 0 | 0.000194032 | 0 |
| | | | Myosin-9 | | | | | | | |
| sp\|Q969V3\|NCLN_HUMAN | 1 | NCLN | NCLN_HUMAN Nicalin | 563 | 0 | 1 | 0 | 0 | 0.000112582 | 0 |
| sp\|O15226-2\|NKRF_HUMAN | 3 | NKRF | NKRF_HUMAN Isoform | 705 | 0 | 0 | 3 | 0 | 0 | 0.000264865 |
| | | | 2 of NF-kappa-B- | | | | | | | |
| | | | repressing factor | | | | | | | |
| sp\|O95478\|NSA2_HUMAN | 0 | NSA2 | NSA2_HUMAN | 260 | 0 | 0 | 1 | 0 | 0 | 0.000239397 |
| | | | Ribosome biogenesis | | | | | | | |
| | | | protein NSA2 homolog | | | | | | | |
| sp\|P21589\|5NTD_HUMAN | 7 | NT5E | 5NTD_HUMAN 5′- | 574 | 0 | 7 | 0 | 0 | 0.000772973 | 0 |
| | | | nucleotidase | | | | | | | |
| sp\|P13674\|P4HA1_HUMAN | 10 | P4HA1 | P4HA1_HUMAN Prolyl | 534 | 0 | 11 | 0 | 0 | 0.00130566 | 0 |
| | | | 4-hydroxylase subunit | | | | | | | |
| | | | alpha-1 | | | | | | | |
| sp\|O15460\|P4HA2_HUMAN | 4 | P4HA2 | P4HA2_HUMAN Prolyl | 535 | 0 | 4 | 0 | 0 | 0.000473898 | 0 |
| | | | 4-hydroxylase subunit | | | | | | | |
| | | | alpha-2 | | | | | | | |
| sp\|P07237\|PDIA1_HUMAN | 4 | P4HB | PDIA1_HUMAN | 508 | 0 | 4 | 0 | 0 | 0.000499085 | 0 |
| | | | Protein disulfide- | | | | | | | |
| | | | isomerase | | | | | | | |
| sp\|Q13310-3\|PABP4_HUMAN | 6 | PABPC4 | PABP4_HUMAN | 660 | 0 | 3 | 3 | 0 | 0.000288108 | 0.000282924 |
| | | | Isoform 3 of | | | | | | | |
| | | | Polyadenylate-binding | | | | | | | |
| | | | protein 4 | | | | | | | |
| sp\|Q8WX93\|PALLD_HUMAN | 1 | PALLD | PALLD_HUMAN | 1383 | 0 | 1 | 0 | 0 | 4.58307E−05 | 0 |
| | | | Palladin | | | | | | | |
| sp\|Q9NVD7\|PARVA_HUMAN | 1 | PARVA | PARVA_HUMAN | 372 | 0 | 1 | 0 | 0 | 0.000170387 | 0 |
| | | | Alpha-parvin | | | | | | | |
| sp\|Q96HS1\|PGAM5_HUMAN | 1 | PGAM5 | PGAM5_HUMAN | 289 | 0 | 0 | 1 | 0 | 0 | 0.000215374 |
| | | | Serine/threonine- | | | | | | | |
| | | | protein phosphatase | | | | | | | |
| | | | PGAM5, mitochondrial | | | | | | | |
| sp\|Q9UHX1\|PUF60_HUMAN | 4 | PUF60 | PUF60_HUMAN | 559 | 0 | 4 | 0 | 0 | 0.000453552 | 0 |
| | | | Poly(U)-binding- | | | | | | | |
| | | | splicing factor PUF60 | | | | | | | |
| sp\|P11234\|RALB_HUMAN | 1 | RALB | RALB_HUMAN Ras- | 206 | 0 | 1 | 0 | 0 | 0.000307688 | 0 |
| | | | related protein Ral-B | | | | | | | |
| sp\|P62826\|RAN_HUMAN | 2 | RAN | RAN_HUMAN GTP- | 216 | 0 | 0 | 2 | 0 | 0 | 0.000576326 |
| | | | binding nuclear | | | | | | | |
| | | | protein Ran | | | | | | | |
| sp\|P54136\|SYRC_HUMAN | 1 | RARS | SYRC_HUMAN | 660 | 0 | 1 | 0 | 0 | 9.60361E−05 | 0 |
| | | | Arginine--tRNA ligase, | | | | | | | |
| | | | cytoplasmic | | | | | | | |
| sp\|P78332\|RBM6_HUMAN | 5 | RBM6 | RBM6_HUMAN RNA- | 1123 | 0 | 0 | 5 | 0 | 0 | 0.000277129 |
| | | | binding protein 6 | | | | | | | |
| sp\|Q6XE24\|RBMS3_HUMAN | 1 | RBMS3 | RBMS3_HUMAN RNA- | 437 | 0 | 1 | 0 | 0 | 0.000145043 | 0 |
| | | | binding motif, single- | | | | | | | |
| | | | stranded-interacting | | | | | | | |
| | | | protein 3 | | | | | | | |
| sp\|P26373\|RL13_HUMAN | 6 | RPL13 | RL13_HUMAN 60S | 211 | 0 | 2 | 4 | 0 | 0.000600795 | 0.00117997 |
| | | | ribosomal protein L13 | | | | | | | |
| sp\|P61353\|RL27_HUMAN | 1 | RPL27 | RL27_HUMAN 60S | 136 | 0 | 1 | 0 | 0 | 0.000466058 | 0 |
| | | | ribosomal protein L27 | | | | | | | |
| sp\|P42766\|RL35_HUMAN | 1 | RPL35 | RL35_HUMAN 60S | 123 | 0 | 0 | 1 | 0 | 0 | 0.000506042 |
| | | | ribosomal protein L35 | | | | | | | |
| sp\|P18124\|RL7_HUMAN | 2 | RPL7 | RL7_HUMAN 60S | 248 | 0 | 2 | 2 | 0 | 0.00051116 | 0.000501961 |
| | | | ribosomal protein L7 | | | | | | | |
| sp\|P05388\|RLA0_HUMAN | 2 | RPLP0 | RLA0_HUMAN 60S | 317 | 0 | 1 | 1 | 0 | 0.000199949 | 0.000196351 |
| | | | acidic ribosomal | | | | | | | |
| | | | protein P0 | | | | | | | |
| sp\|P04843\|RPN1_HUMAN | 1 | RPN1 | RPN1_HUMAN | 607 | 0 | 2 | 0 | 0 | 0.000208843 | 0 |
| | | | Dolichyl- | | | | | | | |
| | | | diphosphooligosaccharide-- | | | | | | | |
| | | | protein | | | | | | | |
| | | | glycosyltransferase | | | | | | | |
| | | | subunit 1 | | | | | | | |
| sp\|P04844\|RPN2_HUMAN | 2 | RPN2 | RPN2_HUMAN | 631 | 0 | 2 | 0 | 0 | 0.0002009 | 0 |
| | | | Dolichyl- | | | | | | | |
| | | | diphosphooligosaccharide-- | | | | | | | |
| | | | protein | | | | | | | |
| | | | glycosyltransferase | | | | | | | |
| | | | subunit 2 | | | | | | | |
| sp\|P62280\|RS11_HUMAN | 4 | RPS11 | RS11_HUMAN 40S | 158 | 0 | 2 | 2 | 0 | 0.000802327 | 0.000787889 |
| | | | ribosomal protein S11 | | | | | | | |
| sp\|P62263\|RS14_HUMAN | 1 | RPS14 | RS14_HUMAN 40S | 151 | 0 | 2 | 0 | 0 | 0.000839521 | 0 |
| | | | ribosomal protein S14 | | | | | | | |
| sp\|P62244\|RS15A_HUMAN | 2 | RPS15A | RS15A_HUMAN 40S | 130 | 0 | 1 | 1 | 0 | 0.000487568 | 0.000478794 |
| | | | ribosomal protein S15a | | | | | | | |
| sp\|P62249\|RS16_HUMAN | 1 | RPS16 | RS16_HUMAN 40S | 146 | 0 | 1 | 0 | 0 | 0.000434136 | 0 |
| | | | ribosomal protein S16 | | | | | | | |
| sp\|P42677\|RS27_HUMAN | 2 | RPS27 | RS27_HUMAN 40S | 84 | 0 | 1 | 1 | 0 | 0.000754569 | 0.00074099 |
| | | | ribosomal protein S27 | | | | | | | |
| sp\|P23396-2\|RS3_HUMAN | 6 | RPS3 | RS3_HUMAN Isoform | 259 | 0 | 3 | 3 | 0 | 0.000734176 | 0.000720964 |
| | | | 2 of 40S ribosomal | | | | | | | |
| | | | protein S3 | | | | | | | |
| sp\|P62241\|RS8_HUMAN | 5 | RPS8 | RS8_HUMAN 40S | 208 | 0 | 2 | 3 | 0 | 0.00060946 | 0.000897738 |
| | | | ribosomal protein S8 | | | | | | | |
| sp\|P46781\|RS9_HUMAN | 2 | RPS9 | RS9_HUMAN 40S | 194 | 0 | 0 | 2 | 0 | 0 | 0.000641682 |
| | | | ribosomal protein S9 | | | | | | | |
| sp\|Q9P2E9\|RRBP1_HUMAN | 6 | RRBP1 | RRBP1_HUMAN | 1410 | 0 | 6 | 0 | 0 | 0.000269718 | 0 |
| | | | Ribosome-binding | | | | | | | |
| | | | protein 1 | | | | | | | |
| sp\|Q15424-3\|SAFB1_HUMAN | 3 | SAFB | SAFB1_HUMAN | 917 | 0 | 0 | 3 | 0 | 0 | 0.000203631 |
| | | | Isoform 3 of Scaffold | | | | | | | |
| | | | attachment factor B1 | | | | | | | |
| sp\|P50454\|SERPH_HUMAN | 10 | SERPINH1 | SERPH_HUMAN Serpin | 418 | 0 | 10 | 0 | 0 | 0.00151636 | 0 |
| | | | H1 | | | | | | | |
| sp\|Q7Z333-4\|SETX_HUMAN | 1 | SETX | SETX_HUMAN Isoform | 2706 | 0 | 0 | 1 | 0 | 0 | 2.30019E−05 |
| | | | 4 of Probable helicase | | | | | | | |
| | | | senataxin | | | | | | | |
| sp\|Q92629-2\|SGCD_HUMAN | 1 | SGCD | SGCD_HUMAN | 290 | 0 | 1 | 0 | 0 | 0.000218565 | 0 |
| | | | Isoform 2 of Delta- | | | | | | | |
| | | | sarcoglycan | | | | | | | |
| sp\|O60264\|SMCA5_HUMAN | 0 | SMARCA5 | SMCA5_HUMAN | 1052 | 0 | 0 | 4 | 0 | 0 | 0.000236666 |
| | | | SWI/SNF-related | | | | | | | |
| | | | matrix-associated | | | | | | | |
| | | | actin-dependent | | | | | | | |
| | | | regulator of chromatin | | | | | | | |
| | | | subfamily A member 5 | | | | | | | |
| sp\|Q9Y651\|SOX21_HUMAN | 0 | SOX21 | SOX21_HUMAN | 276 | 0 | 0 | 1 | 0 | 0 | 0.000225519 |
| | | | Transcription factor | | | | | | | |
| | | | SOX-21 | | | | | | | |
| sp\|Q13813-2\|SPTN1_HUMAN | 4 | SPTAN1 | SPTN1_HUMAN | | | | | | 7.67668E−05 | 2.51285E−05 |
| | | | Isoform 2 of Spectrin | | | | | | | |
| | | | alpha chain, non- | 2477 | 0 | 3 | 1 | 0 | | |
| | | | erythrocytic 1 | | | | | | | |
| sp\|Q01082\|SPTB2_HUMAN | 4 | SPTBN1 | SPTB2_HUMAN | 2364 | 0 | 5 | 0 | 0 | 0.000134061 | 0 |
| | | | Spectrin beta chain, | | | | | | | |
| | | | non-erythrocytic 1 | | | | | | | |
| sp\|Q9UQ35\|SRRM2_HUMAN | 0 | SRRM2 | SRRM2_HUMAN | 2752 | 0 | 0 | 3 | 0 | 0 | 6.78523E−05 |
| | | | Serine/arginine | | | | | | | |
| | | | repetitive matrix | | | | | | | |
| | | | protein 2 | | | | | | | |
| sp\|O75494\|SRS10_HUMAN | 1 | SRSF10 | SRS10_HUMAN | 262 | 0 | 1 | 0 | 0 | 0.000241923 | 0 |
| | | | Serine/arginine-rich | | | | | | | |
| | | | splicing factor 10 | | | | | | | |
| sp\|Q04837\|SSBP_HUMAN | 1 | SSBP1 | SSBP_HUMAN Single- | 148 | 0 | 0 | 1 | 0 | 0 | 0.000420562 |
| | | | stranded DNA-binding | | | | | | | |
| | | | protein, mitochondrial | | | | | | | |
| sp\|O60506\|HNRPQ_HUMAN | 1 | SYNCRIP | HNRPQ_HUMAN | 623 | 0 | 1 | 0 | 0 | 0.00010174 | 0 |
| | | | Heterogeneous | | | | | | | |
| | | | nuclear | | | | | | | |
| | | | ribonucleoprotein Q | | | | | | | |
| sp\|P21980\|TGM2_HUMAN | 2 | TGM2 | TGM2_HUMAN | 687 | 0 | 2 | 0 | 0 | 0.000184523 | 0 |
| | | | Protein-glutamine | | | | | | | |
| | | | gamma- | | | | | | | |
| | | | glutamyltransferase 2 | | | | | | | |
| sp\|P07996\|TSP1_HUMAN | 1 | THBS1 | TSP1_HUMAN | 1170 | 0 | 4 | 0 | 0 | 0.000216697 | 0 |
| | | | Thrombospondin-1 | | | | | | | |
| sp\|Q9UPQ9\|TNR6B_HUMAN | 3 | TNRC6B | TNR6B_HUMAN | 1833 | 0 | 2 | 1 | 0 | 6.91586E−05 | 0.000033957 |
| | | | Trinucleotide repeat- | | | | | | | |
| | | | containing gene 6B | | | | | | | |
| | | | protein | | | | | | | |
| sp\|P62995\|TRA2B_HUMAN | 1 | TRA2B | TRA2B_HUMAN | 288 | 0 | 1 | 0 | 0 | 0.000220083 | 0 |
| | | | Transformer-2 protein | | | | | | | |
| | | | homolog beta | | | | | | | |
| sp\|Q14157-5\|UBP2L_HUMAN | 2 | UBAP2L | UBP2L_HUMAN | 1104 | 0 | 1 | 1 | 0 | 5.74129E−05 | 5.63797E−05 |
| | | | Isoform 5 of Ubiquitin- | | | | | | | |
| | | | associated protein 2- | | | | | | | |
| | | | like | | | | | | | |
| sp\|P0CG48\|UBC_HUMAN | 2 | UBC | UBC_HUMAN | 685 | 0 | 1 | 1 | 0 | 9.25311E−05 | 0.000090866 |
| | | | Polyubiquitin-C | | | | | | | |
| sp\|P22695\|QCR2_UMAN | 1 | UQCRC2 | QCR2_HUMAN | 453 | 0 | 1 | 0 | 0 | 0.00013992 | 0 |
| | | | Cytochrome b-c1 | | | | | | | |
| | | | complex subunit 2, | | | | | | | |
| | | | mitochondrial | | | | | | | |
| sp\|P0C7P4\|UCRIL_HUMAN | 1 | UQCRFS1P1 | UCRIL HUMAN | 283 | 0 | 1 | 0 | 0 | 0.000223971 | 0 |
| | | | Putative cytochrome | | | | | | | |
| | | | b-c1 complex subunit | | | | | | | |
| | | | Rieske-like protein 1 | | | | | | | |
| sp\|Q14146\|URB2_HUMAN | 0 | URB2 | URB2_HUMAN | 1524 | 0 | 0 | 1 | 0 | 0 | 0.000040842 |
| | | | Unhealthy ribosome | | | | | | | |
| | | | biogenesis protein 2 | | | | | | | |
| | | | homolog | | | | | | | |
| sp\|P08670\|VIME_HUMAN | 1 | VIM | VIME_HUMAN | 466 | 0 | 1 | 0 | 0 | 0.000136017 | 0 |
| | | | Vimentin | | | | | | | |
| sp\|Q9H0D6\|XRN2_HUMAN | 1 | XRN2 | XRN2_HUMAN 5′-3′ | 950 | 0 | 0 | 1 | 0 | 0 | 6.55192E−05 |
| | | | exoribonuclease 2 | | | | | | | |
| sp\|P49750-4\|YLPM1_HUMAN | 13 | YLPM1 | YLPM1_HUMAN | 2146 | 0 | 9 | 4 | 0 | 0.000265822 | 0.000116017 |
| | | | Isoform 4 of YLP motif- | | | | | | | |
| | | | containing protein 1 | | | | | | | |
| sp\|O75152\|ZC11A_HUMAN | 0 | ZC3H11A | ZC11A_HUMAN Zinc | 810 | 0 | 0 | 1 | 0 | 0 | 7.68435E−05 |
| | | | finger CCCH domain- | | | | | | | |
| | | | containing protein 11A | | | | | | | |
| sp\|Q5BKZ1\|ZN326_HUMAN | 3 | ZNF326 | ZN326_HUMAN DBIRD | 582 | 0 | 0 | 7 | 0 | 0 | 0.00074863 |
| | | | complex subunit | | | | | | | |
| | | | ZNF326 | | | | | | | |

TABLE 7C
Aska-SS −+ shSSX

| | Aska | Aska | |
|---|---|---|---|
| | (shControl)/Aska | (shControl)/Aska | |
| | (shSS18-SSX) | (shSS18-SSX) | |
| | LFQ Intensity | LFQ Intensity | |
| | (Norm to | (Norm to | |
| | SMARCA4 | SMARCA4 | % |
| Gene names | Rep 1) | Rep 2) | Coverage |
| SSX1; SSX8 | 8.69195075 | 66.78165769 | 12.2 |
| SMARCA4 | 1 | 1 | 43 |
| SS18 | 0.959463613 | 1.263985576 | 7.7 |
| BCL7C | 1.744253828 | 1.537120215 | 57.1 |
| BCL7B | 1.339078001 | 1.126236646 | 21.8 |
| ACTL6A | 0.783942638 | 1.104979803 | 56.6 |
| SMARCE1 | 0.893791358 | 0.854705908 | 61.8 |
| SMARCD1 | 0.770993178 | 0.949816024 | 79.4 |
| SMARCC1 | 0.505600572 | 0.622079125 | 47 |
| ARID1B | 0.721229344 | 0.649778539 | 41 |
| SMARCB1 | 0.022092646 | 0.063656869 | 60.9 |

[0543] Finally, to evaluate whether SS18-SSX-containing BAF complexes that are tethered to the nucleosome acidic patch via SSX in place of the BAF core module SMARCB1 C-terminal acidic patch binding region (Valencia et al. (2019) Cell 179:1342-1356) are competent in remodeling, chromatin remodeling assays were performed using restriction enzyme accessibility assays (REAA) on endogenous BAF complexes containing either SS18 WT or SS18-SSX as well as assay for transposase-accessible chromatin using sequencing (ATAC-seq) in both CRL7250 fibroblasts and SS cell lines. Remodeling efficiency and ATPase activity of SS18-SSX-bound BAF complexes was slightly lower than that of WT SS18-bound complexes (FIGS. 7I, 10E and 10G), however, this reduced activity was sufficient to enable DNA accessibility over SS18-SSX target sites genome-wide (FIGS. 7J and 10F).

[0544] Taken together, these data resolve SSX as a nucleosome acidic patch binding ligand fused to SS18, a subunit bound to the BAF complex ATPase subunit, SMARCA4 at its N-terminal region within the core structural module (Valencia et al. (2019) Cell 179:1342-1356; Ye et al. (2019) Science doi:10.1126/science.aay0033), that dominantly competes for acidic patch binding with BAF core module subunit SMARCB1, resulting in its partial destabilization and degradation. These oncogenic SS18-SSX-containing complexes are still proficient in chromatin remodeling and catalytic activity, resulting in the aberrant activation of normally repressed chromatin regions.

### Example 5: SSX Exhibits Preference for H2A K119Ub-Marked Nucleosomes, Mediated by its Conserved C-Terminal Acidic Region

[0545] Previously, it was found that SS18-SSX-bound BAF complexes localize to polycomb-repressed regions (McBride et al. (2018) Cancer Cell 33:1128-1141). The engagement between the conserved SSX basic region and the nucleosome acidic patch is not, in itself, sufficient to explain why SS18-SSX complexes are preferentially recruited to repressed chromatin. It was therefore reasoned that the SSX-nucleosome acidic patch interaction can be augmented in some manner by the presence of specific histone repressive marks. To explore this possibility, CRISPR-Cas9-based screening of genes encoding proteins that are responsible for decorating and maintaining repressive chromatin was performed. These studies were performed in the SS cell line, SYO-1, as well as in a cell line that is an SS histologic mimic lacking the SS18-SSX fusion, SW982 (FIG. 11A). Notably, it was found that PRC1 subunits (specifically, Ring1A/B, as well as PCGF5 and PCGF3 components of PRC1.3 and PRC1.5 complexes) were selectively enriched as synthetic lethal dependencies in SS cell lines SYO1 as well as other SS cell lines including Yamato and SCS241 (FIGS. 11A, 12A and 12D). Importantly, all SS cell lines profiled exhibited significant dependency on SS18 and SSX (and hence the SS18-SSX fusion), relative to all other cell lines profiled (FIGS. 12E and 12F).

[0546] Given that the key histone modification placed by PRC1 is the H2A K119Ub mark, it was determined whether SSX exhibited any preferential binding to nucleosomes decorated with this modification. Notably, it was found that in SS cell lines, H2AK119Ub directly co-localized with sites of SS18-SSX BAF complex occupancy (FIGS. 11B-11C and FIG. 12B). This was consistent with the IF observations indicating substantial co-localization at Barr bodies (FIGS. 3C, 5A, 5B, 5D, 6C and 9C). Indeed, pulldown experiments and AlphaLisa binding assays performed with GST-SSX 78aa protein revealed significantly higher affinity to H2A K119Ub-decorated nucleosomes relative to unmodified nucleosomes or H2B K120Ub nucleosomes (FIGS. 11D-11E and 12G). Incubation of SSX 78aa with mammalian mononucleosomes also captured the higher molecular weight H2AUb species (FIG. 12C), as did SS18-SSX-bound BAF complexes (FIGS. 1A-1B, Tables 5A-5E). Importantly, endogenously purified SS18-SSX-bound BAF complexes enriched for binding of recombinant H2A K119Ub-modified nucleosomes over unmodified nucleosomes (FIGS. 11F, 12H and 12I), consistent with the finding that SS18-SSX fusion target sites directly overlay H2AK119Ub sites genome-wide in SS cell lines (FIG. 11B). Finally, a screen for SSX binding to a range of differentially-marked recombinant mononucleosomes as well as mammalian (pooled) nucleosomes was performed, and again, it was identified that GST-SSX 78aa preferentially bound to H2A K119Ub and mammalian nucleosomes over unmodified nucleosomes or nucleosomes with other histone marks (FIGS. 12J-K). Fluorescence polarization (FP) experiments performed using fluoro-labeled SSX (in place of GST tag) also confirmed higher binding affinity to H2A K119Ub-decorated nucleosomes compared to unmodified nucleosomes (FIG. 12I). To understand the role of H2A K119Ub in SSX-BAF localization, the core, catalytic subunits of the PRC1 complex, RING1A and RING1B, were next double deleted using CRISPR-Cas9 in HEK-293T cells (RING1A/1B-dKO HEK-293T cells) and expressed SS18-SSX (FIG. 13A). Following immunofluorescence, complete loss of SS18-SSX localization to Barr bodies was observed as compared to RING1A/B WT cells (FIGS. 11G-11H). To address whether the catalytic activity of PRC1 rather than PRC1 complex formation is required for SS18-SSX Barr body recruitment, structure-guided mutagenesis was performed to selectively disrupt the ubiquitin ligase activity of PRC1 and hence block its placement of H2A K119Ub (FIG. 11G). a series of point mutations in RING1B were designed to disrupt acidic patch recognition (R98A), zinc binding (H69Y/R70C) and the E2 binding interface (R91A and I53A/D56K (Blackledge et al. (2019) BioRxiv 667667, doi:10.1101/667667)) (FIGS. 11G-11H and 13B-13C). Rescue of WT RING1B in RING1A/1B-dKO cells was able to completely rescue SSX localization. However, restoration of RING1B mutant variants affected SS18-SSX localization in a manner directly proportional to the degree to which these RING1B mutations impacted H2A K119Ub deposition. Significantly for this study, RING1A ligase-deficient R91E and I53A/D56K were able to form polycomb foci but were unable to recruit SS18-SSX, further highlighting the importance of the H2A K119Ub mark placement. As controls, R98A, and combined H69Y/R70C mutants had similar loss-of-function effects on SS18-SSX localization (Wang et al. (2004) Nature 431:873-878; McGinty et al. (2014) Nature 514:591-596) (FIGS. 11G-11H and 13B-13C). The widely-used I53A mutant (Buchwald et al. (2006) EMBO J. 25:2465-2474; Eskeland et al. (2010) Mol. Cell 38:452-464; Illingworth et al. (2015) Genes & Dev. 29:1897-1902) only partially attenuated H2A ubiquitination, and therefore had little effect on SSX targeting. As further support for a role for H2A K119Ub in SSX recruitment, a peptide hybridization assay performed on IMR90 cells pretreated with the deubiquitinating enzyme, USP2 was used. USP2-mediated removal of H2A K119Ub disrupted SSX peptide hybridization to Barr bodies specifically and without affecting its overall nuclear staining pattern, consistent with the general ability of SSX to bind unmodified nucleosomes via its acidic patch binding region (FIGS. 11I and 13D). EZH2 inhibitor treatment performed in WT HEK-293T or RING1A/B dKO HEK-293T cells further highlighted the requirement for H2A Ub119 placement (and hence PRC1) rather than H3K27me3 and PRC2 activity (FIGS. 13F-13G). Somewhat surprisingly, given the clear role for H2A K119Ub in recruiting SSX to chromatin, direct binding between SSX and free ubiquitin was not observed, as assessed by a Ub-agarose pull down assay (FIG. 13E), however, it is conceivable that SSX only engages Ub in the context of H2AK119Ub nucleosomes, as seen with other readers such as Dot1L (Anderson et al. (2019) Cell Rep. 26:1681-1690; Worden et al. (2019) Cell 176:1490-1501; Valencia-Sanchez et al. (2019) Mol. Cell 74:1010-1019), or alternatively, that it can recognize specific features of the nucleosome core itself that are sterically or allosterically affected by the presence of the ubiquitylation mark.

[0547] Finally, given that the conserved C-terminal acidic region of SSX did not disrupt SSX-nucleosome binding (FIG. 3F) but did affect SS18-SSX-specific BAF complex targeting and resultant gene expression and proliferation (FIGS. 3G-3I) in a manner comparable to loss of the basic region (acidic patch binding region), it was determined whether this region mediates the preference of SSX for H2A K119Ub-decorated nucleosomes. Excitingly, it was found that mutation of the C-terminal acidic region of SSX to alanines (i.e., DPEEDDE (SEQ ID NO: 221) to AAAAAAA (SEQ ID NO: 222)) relieved the preference of SSX for H2AK119Ub nucleosomes, while not altering SSX binding to nucleosomes (FIGS. 11J-11K). These data collectively indicate that the conserved C-terminal acidic amino acids are required to drive the preference of SSX for H2A K119Ub nucleosomes and hence SS18-SSX-bound BAF complex targeting to repressive regions genome-wide, as observed in cells.

[0548] Here an unexpected set of properties have been identified and their functional ramifications were found in the fusion oncoprotein, SS18-SSX, the oncogenic driver of human synovial sarcoma (FIGS. 14A-14B, model). An unusual, and new reported case in which an additional nucleosome acidic patch binding domain is fused to a subunit of a major chromatin remodeling complex, the mammalian SWI/SNF (BAF) complex, causing a generally tumor suppressor complex to gain oncogenic properties was found. Although several SNF2 helicase-based chromatin remodeling complexes are increasingly recognized to require the H2A/H2B nucleosome binding hub, it was found that the minimal, conserved SSX 34 aa region dominantly binds the acidic patch of nucleosomes, with preference for H2A K119Ub histone modification, altering the interaction between the nucleosome-SMARCB1 C-terminal alpha helix- interaction found in WT BAF complexes (Valencia et al. (2019) Cell 179:1342-1356; Ye et al. (2019) Science, doi:10.1126/science.aay0033), and resulting in higher affinity nucleosome binding properties augmented by specific repressive histone mark preferences (Valencia et al. (2019) Cell 179:1342-1356). While these data coupled with recent structural insights in yeast RSC and SWI/SNF complexes provide strong support for SS18-SSX-mediated displacement of SMARCB1 from the acidic patch and its destabilization at the nucleosome-proximal region of the core (base) module of BAF complexes, a high resolution, 3D structure of human BAF complexes containing SS18, as well as those containing SS18-SSX will be needed to define the full repertoire of structural changes to nucleosome-bound BAF complexes upon incorporation of SS18-SSX. This is particularly true given that the SS18 subunit is metazoan-specific and hence is not found in yeast complexes.

[0549] The expression of full length SSX is normally restricted to testes where it likely plays a role in sperm development, potentially involving polycomb-driven XY-body repression through engagement of H2A K119Ub-decorated sex chromosomes (Baarends et al. (1999) Dev. Biol. 207:322-333). Remarkably, this normal function of SSX as a binder of the nucleosome acidic patch and “reader” of this repressive state is leveraged in synovial sarcoma to alter BAF chromatin remodeling complex localization and gene expression patterns. Normally in testes, full-length SSX can function as a ligand for nucleosomes in this H2A K119Ub repressive state to promote further transcriptional repression through use of its N-terminal KRAB domain (Huntley et al. (2006) Genome Res. 16:669-677). In the case of SS, the KRAB domain is lost and replaced with essentially the whole ATPase module of the BAF chromatin remodeling complex via its fusion to SS18. This unfortunate scenario leads to gain of altered repressive chromatin reading properties of BAF complexes, loss of normal BAF complex-nucleosome acidic patch engagement, tight affinity and longer residency times at normally polycomb- repressed regions, and the activation of genes found in these regions (FIGS. 14A-14B, model).

[0550] The SSX 78 aa tail, particularly the conserved 34aa C-terminus was therefore characterized (FIG. 3D) as a ligand of the nucleosome acidic patch and the H2A K119Ub histone mark. These data indicate two non-mutually exclusive explanations for this reading preference: H2A K119Ub modification influences nucleosome structure by further exposes the acidic patch binding site; or, SSX exhibits a direct physical engagement with ubiquitin in the nucleosomal context. While studies that indicate that SSX does not bind directly to free (bead-bound) uniquitin was performed (FIG. 13E), this does not rule out the possibility of direct ubiquitin engagement by the acidic C-terminal region of SSX when SS18-SSX-bound complexes are docked on nucleosomes. In this manner, Dot1L, for example, does not bind free ubiquitin but is only poised to interact with H2B UbK120 during substrate engagement (Anderson et al. (2019) Cell Rep. 26:1681-1690; Worden et al. (2019) Cell 176:1490-1501; Valencia-Sanchez et al. (2019) Mol. Cell 74:1010-1019). Understanding this binding preference requires future 3D high resolution structural characterization of SS18-SSX-bound human BAF complexes. Nonetheless, these results indicate that SSX acts as a nucleosome-specific binding ligand for the acidic patch on H2A K119Ub-decorated nucleosomes and that this property underlies the chromatin localization, gene expression, and synthetic lethal dependency profiles of this tumor type.

[0551] The biochemical and structural properties of fusion partner SSX elucidated here underpin the dependency of SS on PRC1 complex activity that have been detected in fitness screening efforts and in the structure-guided mutagenesis studies. In contrast to other reports (Banito et al. (2018) Cancer cell 33:527-541), direct binding to PRC1 by the SS18-SSX fusion is not found (or by SSX specifically), as has been indicated, nor a selective dependency on KDM2B; rather, it was found that SS18-SSX-bound complexes bind preferentially to H2A K119Ub-marked nucleosomes, and hence require PRC1 complex activity to place the H2AUbK119 mark. In all MS experiments here, peptides corresponding to PRC1 or PRC2 were not detected, rather, highly abundant peptides corresponding to histones and ubiquitin itself were found, and enrichment of peptides corresponding to the ATPase module subunits of BAF complexes (SMARCA4, BCL7A, beta-actin, ACTL6A) to which SS18 was tethered. The increased abundance of BAF complexes bound to SS18-SSX over PRC1-decorated sites and hence the frequency of molecules co-localized on chromatin can help reconcile these previous indications.

[0552] Finally, these results indicate that strategies to directly and specifically inhibit the SSX- or SS18-SSX-bound BAF complex- H2A K119Ub nucleosome interactions can represent viable new strategies for small molecule or inhibitory peptide identification and therapeutic development for synovial sarcoma. In conclusion, this disclosure presents an unexpected nucleosome acidic patch binding function of SSX, a partner within a fusion oncoprotein that lacks a canonical TF DNA-binding domain or recognizable chromatin reader domain and hence has remained a longstanding challenge to understand and target, that drives the altered behavior of the BAF chromatin remodeling complex, activating oncogenic programs in a cancer-specific manner.

### EQUIVALENTS

[0553] Those skilled in the art will recognize, or be able to ascertain using no more than routine experimentation, many equivalents to the specific embodiments encompassed by the present invention described herein. Such equivalents are intended to be encompassed by the following claims.

The application's sequence listing, which the Patent Office published only in electronic form, follows.

SEQUENCE LISTING (244 sequences)

SEQ ID NO: 1 - DNA, 1309 bp, Homo sapiens
accactgctgccgacctcgcaaccactgctttgtctctgaatagagacagggtttccttatgttggccgaactgggcttgacctcctcggctcaagtgatcctcccacctcggcctcggaactacaggtgagactgctcctggtgccatgaacggagacgacacctttgcaaagagacccagggatgatgctaaagcatcagagaagagaagcaaggcctttgatgatattgccacatacttctctaagaaagagtggaaaaagatgaaatactcggagaaaatcagctatgtgtatatgaagagaaactataaggccatgactaaactaggtttcaaagtcaccctcccacctttcatgtgtaataaacaggccacagacttccaggggaatgattttgataatgaccataaccgcaggattcaggttgaacatcctcagatgactttcggcaggctccacagaatcatcccgaagatcatgcccaagaagccagcagaggacgaaaatgattcgaagggagtgtcagaagcatctggcccacaaaacgatgggaaacaactgcaccccccaggaaaagcaaatatttctgagaagattaataagagatctggacccaaaagggggaaacatgcctggacccacagactgcgtgagagaaagcagctggtgatttatgaagagatcagtgaccctgaggaagatgacgagtaactcccctgggggatacgacacatgcccttgatgagaagcagaacgtggtgacctttcacgaacatgggcatggctgcggctccctcgtcatcaggtgcatagcaagtgaaagcaagtgttcacaacggtgaaacttgagcgtcatttttcttagtgtgccaagagttcgatgttagtgtttccattgtattttcttacagtgtgccattctgttagatactatccttataattgatgagcaagacatactgaatgcatatttcggtttgtgtatccatgcacctacgtcagaaaacaagtattgtcaggtattctctccatagaacagcactatcctcatctctccccagatgtgactactgagggcagttctgagtgtttaatttcagactttttcctctgcatttacacacacacacacacacacacgcacacacacacaccaagtaccagtataagcatctcccatctgcttttcccattgccatgcgtcctggtcaagcccccctcactctgtttcctgttcagcatgtactcccctcatccgattcccctgtatcagtcactgacagttaataaacctttgcaaacgttc

SEQ ID NO: 2 - DNA, 1223 bp, Homo sapiens
accactgctgccgacctcgcaaccactgctttgtctctgaagtgagactgctcctggtgccatgaacggagacgacacctttgcaaagagacccagggatgatgctaaagcatcagagaagagaagcaaggcctttgatgatattgccacatacttctctaagaaagagtggaaaaagatgaaatactcggagaaaatcagctatgtgtatatgaagagaaactataaggccatgactaaactaggtttcaaagtcaccctcccacctttcatgtgtaataaacaggccacagacttccaggggaatgattttgataatgaccataaccgcaggattcaggttgaacatcctcagatgactttcggcaggctccacagaatcatcccgaagatcatgcccaagaagccagcagaggacgaaaatgattcgaagggagtgtcagaagcatctggcccacaaaacgatgggaaacaactgcaccccccaggaaaagcaaatatttctgagaagattaataagagatctggacccaaaagggggaaacatgcctggacccacagactgcgtgagagaaagcagctggtgatttatgaagagatcagtgaccctgaggaagatgacgagtaactcccctgggggatacgacacatgcccttgatgagaagcagaacgtggtgacctttcacgaacatgggcatggctgcggctccctcgtcatcaggtgcatagcaagtgaaagcaagtgttcacaacggtgaaacttgagcgtcatttttcttagtgtgccaagagttcgatgttagtgtttccattgtattttcttacagtgtgccattctgttagatactatccttataattgatgagcaagacatactgaatgcatatttcggtttgtgtatccatgcacctacgtcagaaaacaagtattgtcaggtattctctccatagaacagcactatcctcatctctccccagatgtgactactgagggcagttctgagtgtttaatttcagactttttcctctgcatttacacacacacacacacacacacgcacacacacacaccaagtaccagtataagcatctcccatctgcttttcccattgccatgcgtcctggtcaagcccccctcactctgtttcctgttcagcatgtactcccctcatccgattcccctgtatcagtcactgacagttaataaacctttgcaaacgttc

SEQ ID NO: 3 - protein, 188 aa, Homo sapiens
MNGDDTFAKRPRDDAKASEKRSKAFDDIATYFSKKEWKKMKYSEKISYVYMKRNYKAMTKLGFKVTLPPFMCNKQATDFQGNDFDNDHNRRIQVEHPQMTFGRLHRIIPKIMPKKPAEDENDSKGVSEASGPQNDGKQLHPPGKANISEKINKRSGPKRGKHAWTHRLRERKQLVIYEEISDPEEDDE

SEQ ID NO: 4 - DNA, 1494 bp, Homo sapiens
gggattggctactttaagttcagagtacgcatgctctgactttctctctctttcgattcttccatactcagagtacgcacggtctgattttctctttggattcttccaaaatcagagtcagactgctcccggtgccatgaacggagacgacgcctttgcaaggagacccacggttggtgctcaaataccagagaagatccaaaaggccttcgatgatattgccaaatacttctctaaggaagagtgggaaaagatgaaagcctcggagaaaatcttctatgtgtatatgaagagaaagtatgaggctatgactaaactaggtttcaaggccaccctcccacctttcatgtgtaataaacgggccgaagacttccaggggaatgatttggataatgaccctaaccgtgggaatcaggttgaacgtcctcagatgactttcggcaggctccagggaatctccccgaagatcatgcccaagaagccagcagaggaaggaaatgattcggaggaagtgccagaagcatctggcccacaaaatgatgggaaagagctgtgccccccgggaaaaccaactacctctgagaagattcacgagagatctggaaatagggaggcccaagaaaaggaagagagacgcggaacagctcatcggtggagcagtcagaacacacacaacattggtcgattcagtttgtcaacttctatgggtgcagttcatggtacccccaaaacaattacacacaacagggacccaaaaggggggaacatgcctggacccacagactgcgtgagagaaaacagctggtgatttatgaagagatcagcgaccctgaggaagatgacgagtaactcccctcagggatacgacacatgcccatgatgagaagcagaacgtggtgacctttcacgaacatgggcatggctgcggacccctcgtcatcaggtgcatagcaagtgaaagcaagtgttcacaacagtgaaaagttgagcgtcatttttcttagtgtgccaagagttcgatgttagcgtttacgttgtattttcttacactgtgtcattctgttagatactaacattttcattgatgagcaagacatacttaatgcatattttggtttgtgtatccatgcacctaccttagaaaacaagtattgtcggttacctctgcatggaacagcattaccctcctctctccccagatgtgactactgagggcagttctgagtgtttaatttcagattttttcctctgcatttacacacacacgcacacaaaccacaccacacacacacacacacacacacacacacacacacacacacaccaagtaccagtataagcatctgccatctgcttttcccattgccatgcgtcctggtcaagctcccctcactctgtttcctggtcagcatgtactcccctcatccgattcccctgtagcagtcactgacagttaataaacctttgcaaacgttcaaaaaaaaaaaaaaaaaa

SEQ ID NO: 5 - protein, 223 aa, Homo sapiens
MNGDDAFARRPTVGAQIPEKIQKAFDDIAKYFSKEEWEKMKASEKIFYVYMKRKYEAMTKLGFKATLPPFMCNKRAEDFQGNDLDNDPNRGNQVERPQMTFGRLQGISPKIMPKKPAEEGNDSEEVPEASGPQNDGKELCPPGKPTTSEKIHERSGNREAQEKEERRGTAHRWSSQNTHNIGRFSLSTSMGAVHGTPKTITHNRDPKGGNMPGPTDCVRENSW

SEQ ID NO: 6 - DNA, 1348 bp, Homo sapiens
gggattggctactttaagttcagagtacgcatgctctgactttctctctctttcgattcttccatactcagagtacgcacggtctgattttctctttggattcttccaaaatcagagtcagactgctcccggtgccatgaacggagacgacgcctttgcaaggagacccacggttggtgctcaaataccagagaagatccaaaaggccttcgatgatattgccaaatacttctctaaggaagagtgggaaaagatgaaagcctcggagaaaatcttctatgtgtatatgaagagaaagtatgaggctatgactaaactaggtttcaaggccaccctcccacctttcatgtgtaataaacgggccgaagacttccaggggaatgatttggataatgaccctaaccgtgggaatcaggttgaacgtcctcagatgactttcggcaggctccagggaatctccccgaagatcatgcccaagaagccagcagaggaaggaaatgattcggaggaagtgccagaagcatctggcccacaaaatgatgggaaagagctgtgccccccgggaaaaccaactacctctgagaagattcacgagagatctggacccaaaaggggggaacatgcctggacccacagactgcgtgagagaaaacagctggtgatttatgaagagatcagcgaccctgaggaagatgacgagtaactcccctcagggatacgacacatgcccatgatgagaagcagaacgtggtgacctttcacgaacatgggcatggctgcggacccctcgtcatcaggtgcatagcaagtgaaagcaagtgttcacaacagtgaaaagttgagcgtcatttttcttagtgtgccaagagttcgatgttagcgtttacgttgtattttcttacactgtgtcattctgttagatactaacattttcattgatgagcaagacatacttaatgcatattttggtttgtgtatccatgcacctaccttagaaaacaagtattgtcggttacctctgcatggaacagcattaccctcctctctccccagatgtgactactgagggcagttctgagtgtttaatttcagattttttcctctgcatttacacacacacgcacacaaaccacaccacacacacacacacacacacacacacacacacacacacacaccaagtaccagtataagcatctgccatctgcttttcccattgccatgcgtcctggtcaagctcccctcactctgtttcctggtcagcatgtactcccctcatccgattcccctgtagcagtcactgacagttaataaacctttgcaaacgttcaaaaaaaaaaaaaaaaaa

SEQ ID NO: 7 - protein, 188 aa, Homo sapiens
MNGDDAFARRPTVGAQIPEKIQKAFDDIAKYFSKEEWEKMKASEKIFYVYMKRKYEAMTKLGFKATLPPFMCNKRAEDFQGNDLDNDPNRGNQVERPQMTFGRLQGISPKIMPKKPAEEGNDSEEVPEASGPQNDGKELCPPGKPTTSEKIHERSGPKRGEHAWTHRLRERKQLVIYEEISDPEEDDE

SEQ ID NO: 8 - DNA, 1426 bp, Homo sapiens
gggattggctactttaagttcagagtacgcatgctctgactttctctctctttcgattcttccatactcagagtacgcacggtctgattttctctttggattcttccaaaatcagagtcagactgctcccggtgccatgaacggagacgacgcctttgcaaggagacccacggttggtgctcaaataccagagaagatccaaaaggccttcgatgatattgccaaatacttctctaaggaagagtgggaaaagatgaaagcctcggagaaaatcttctatgtgtatatgaagagaaagtatgaggctatgactaaactaggtttcaaggccaccctcccacctttcatgtgtaataaacgggccgaagacttccaggggaatgatttggataatgaccctaaccgtgggaatcaggttgaacgtcctcagatgactttcggcaggctccagggaatctccccgaagatcatgcccaagaagccagcagaggaaggaaatgattcggaggaagtgccagaagcatctggcccacaaaatgatgggaaagagctgtgccccccgggaaaaccaactacctctgagaagattcacgagagatctggaaatagggaggcccaagaaaaggaagagagacgcggaacagctcatcggtggagcagtcagaacacacacaacattggacccaaaaggggggaacatgcctggacccacagactgcgtgagagaaaacagctggtgatttatgaagagatcagcgaccctgaggaagatgacgagtaactcccctcagggatacgacacatgcccatgatgagaagcagaacgtggtgacctttcacgaacatgggcatggctgcggacccctcgtcatcaggtgcatagcaagtgaaagcaagtgttcacaacagtgaaaagttgagcgtcatttttcttagtgtgccaagagttcgatgttagcgtttacgttgtattttcttacactgtgtcattctgttagatactaacattttcattgatgagcaagacatacttaatgcatattttggtttgtgtatccatgcacctaccttagaaaacaagtattgtcggttacctctgcatggaacagcattaccctcctctctccccagatgtgactactgagggcagttctgagtgtttaatttcagattttttcctctgcatttacacacacacgcacacaaaccacaccacacacacacacacacacacacacacacacacacacacacaccaagtaccagtataagcatctgccatctgcttttcccattgccatgcgtcctggtcaagctcccctcactctgtttcctggtcagcatgtactcccctcatccgattcccctgtagcagtcactgacagttaataaacctttgcaaacgttcaaaaaaaaaaaaaaaaaa

SEQ ID NO: 9 - protein, 214 aa, Homo sapiens
MNGDDAFARRPTVGAQIPEKIQKAFDDIAKYFSKEEWEKMKASEKIFYVYMKRKYEAMTKLGFKATLPPFMCNKRAEDFQGNDLDNDPNRGNQVERPQMTFGRLQGISPKIMPKKPAEEGNDSEEVPEASGPQNDGKELCPPGKPTTSEKIHERSGNREAQEKEERRGTAHRWSSQNTHNIGPKRGEHAWTHRLRERKQLVIYEEISDPEEDDE

SEQ ID NO: 10 - DNA, 1427 bp, Homo sapiens
ctttcgattcttccatactcagagtacgcacggtctgattttctctttggattcttccaaaatcagagtcagactgctcccggtgccatgaacggagacgacgcctttgcaaggagacccacggttggtgctcaaataccagagaagatccaaaaggccttcgatgatattgccaaatacttctctaaggaagagtgggaaaagatgaaagcctcggagaaaatcttctatgtgtatatgaagagaaagtatgaggctatgactaaactaggtttcaaggccaccctcccacctttcatgtgtaataaacgggccgaagacttccaggggaatgatttggataatgaccctaaccgtgggaatcaggttgaacgtcctcagatgactttcggcaggctccagggaatctccccgaagatcatgcccaagaagccagcagaggaaggaaatgattcggaggaagtgccagaagcatctggcccacaaaatgatgggaaagagctgtgccccccgggaaaaccaactacctctgagaagattcacgagagatctggaaatagggaggcccaagaaaaggaagagagacgcggaacagctcatcggtggagcagtcagaacacacacaacattggtcgattcagtttgtcaacttctatgggtgcagttcatggtacccccaaaacaattacacacaacagggacccaaaaggggggaacatgcctggacccacagactgcgtgagagaaaacagctggtgatttatgaagagatcagcgaccctgaggaagatgacgagtaactcccctcagggatacgacacatgcccatgatgagaagcagaacgtggtgacctttcacgaacatgggcatggctgcggacccctcgtcatcaggtgcatagcaagtgaaagcaagtgttcacaacagtgaaaagttgagcgtcatttttcttagtgtgccaagagttcgatgttagcgtttacgttgtattttcttacactgtgtcattctgttagatactaacattttcattgatgagcaagacatacttaatgcatattttggtttgtgtatccatgcacctaccttagaaaacaagtattgtcggttacctctgcatggaacagcattaccctcctctctccccagatgtgactactgagggcagttctgagtgtttaatttcagattttttcctctgcatttacacacacacgcacacaaaccacaccacacacacacacacacacacacacacacacacacacacacaccaagtaccagtataagcatctgccatctgcttttcccattgccatgcgtcctggtcaagctcccctcactctgtttcctggtcagcatgtactcccctcatccgattcccctgtagcagtcactgacagttaataaacctttgcaaacgttc

SEQ ID NO: 11 - protein, 223 aa, Homo sapiens; identical to SEQ ID NO: 5

SEQ ID NO: 12 - DNA, 1281 bp, Homo sapiens
ctttcgattcttccatactcagagtacgcacggtctgattttctctttggattcttccaaaatcagagtcagactgctcccggtgccatgaacggagacgacgcctttgcaaggagacccacggttggtgctcaaataccagagaagatccaaaaggccttcgatgatattgccaaatacttctctaaggaagagtgggaaaagatgaaagcctcggagaaaatcttctatgtgtatatgaagagaaagtatgaggctatgactaaactaggtttcaaggccaccctcccacctttcatgtgtaataaacgggccgaagacttccaggggaatgatttggataatgaccctaaccgtgggaatcaggttgaacgtcctcagatgactttcggcaggctccagggaatctccccgaagatcatgcccaagaagccagcagaggaaggaaatgattcggaggaagtgccagaagcatctggcccacaaaatgatgggaaagagctgtgccccccgggaaaaccaactacctctgagaagattcacgagagatctggacccaaaaggggggaacatgcctggacccacagactgcgtgagagaaaacagctggtgatttatgaagagatcagcgaccctgaggaagatgacgagtaactcccctcagggatacgacacatgcccatgatgagaagcagaacgtggtgacctttcacgaacatgggcatggctgcggacccctcgtcatcaggtgcatagcaagtgaaagcaagtgttcacaacagtgaaaagttgagcgtcatttttcttagtgtgccaagagttcgatgttagcgtttacgttgtattttcttacactgtgtcattctgttagatactaacattttcattgatgagcaagacatacttaatgcatattttggtttgtgtatccatgcacctaccttagaaaacaagtattgtcggttacctctgcatggaacagcattaccctcctctctccccagatgtgactactgagggcagttctgagtgtttaatttcagattttttcctctgcatttacacacacacgcacacaaaccacaccacacacacacacacacacacacacacacacacacacacacaccaagtaccagtataagcatctgccatctgcttttcccattgccatgcgtcctggtcaagctcccctcactctgtttcctggtcagcatgtactcccctcatccgattcccctgtagcagtcactgacagttaataaacctttgcaaacgttc

SEQ ID NO: 13 - protein, 188 aa, Homo sapiens; identical to SEQ ID NO: 7

SEQ ID NO: 14 - DNA, 1359 bp, Homo sapiens
ctttcgattcttccatactcagagtacgcacggtctgattttctctttggattcttccaaaatcagagtcagactgctcccggtgccatgaacggagacgacgcctttgcaaggagacccacggttggtgctcaaataccagagaagatccaaaaggccttcgatgatattgccaaatacttctctaaggaagagtgggaaaagatgaaagcctcggagaaaatcttctatgtgtatatgaagagaaagtatgaggctatgactaaactaggtttcaaggccaccctcccacctttcatgtgtaataaacgggccgaagacttccaggggaatgatttggataatgaccctaaccgtgggaatcaggttgaacgtcctcagatgactttcggcaggctccagggaatctccccgaagatcatgcccaagaagccagcagaggaaggaaatgattcggaggaagtgccagaagcatctggcccacaaaatgatgggaaagagctgtgccccccgggaaaaccaactacctctgagaagattcacgagagatctggaaatagggaggcccaagaaaaggaagagagacgcggaacagctcatcggtggagcagtcagaacacacacaacattggacccaaaaggggggaacatgcctggacccacagactgcgtgagagaaaacagctggtgatttatgaagagatcagcgaccctgaggaagatgacgagtaactcccctcagggatacgacacatgcccatgatgagaagcagaacgtggtgacctttcacgaacatgggcatggctgcggacccctcgtcatcaggtgcatagcaagtgaaagcaagtgttcacaacagtgaaaagttgagcgtcatttttcttagtgtgccaagagttcgatgttagcgtttacgttgtattttcttacactgtgtcattctgttagatactaacattttcattgatgagcaagacatacttaatgcatattttggtttgtgtatccatgcacctaccttagaaaacaagtattgtcggttacctctgcatggaacagcattaccctcctctctccccagatgtgactactgagggcagttctgagtgtttaatttcagattttttcctctgcatttacacacacacgcacacaaaccacaccacacacacacacacacacacacacacacacacacacacacaccaagtaccagtataagcatctgccatctgcttttcccattgccatgcgtcctggtcaagctcccctcactctgtttcctggtcagcatgtactcccctcatccgattcccctgtagcagtcactgacagttaataaacctttgcaaacgttc

SEQ ID NO: 15 - protein, 214 aa, Homo sapiens; identical to SEQ ID NO: 9

SEQ ID NO: 16 - DNA, 1209 bp, Homo sapiens
gcccttttgattcttccacaatcagggtgagactgctcccagtgccatgaacggagacgacgcctttgcaaggagacccagggatgatgctcaaatatcagagaagttacgaaaggccttcgatgatattgccaaatacttctctaagaaagagtgggaaaagatgaaatcctcggagaaaatcgtctatgtgtatatgaagctaaactatgaggtcatgactaaactaggtttcaaggtcaccctcccacctttcatgcgtagtaaacgggctgcagacttccacgggaatgattttggtaacgatcgaaaccacaggaatcaggttgaacgtcctcagatgactttcggcagcctccagagaatcttcccgaagatcatgcccaagaagccagcagaggaagaaaatggtttgaaggaagtgccagaggcatctggcccacaaaatgatgggaaacagctgtgccccccgggaaatccaagtaccttggagaagattaacaagacatctggacccaaaagggggaaacatgcctggacccacagactgcgtgagagaaagcagctggtggtttatgaagagatcagcgaccctgaggaagatgacgagtaactcccctcggggatatgacacatgcccatgatgagaagcagaacgtggtgacctttcacgaacatgggcatggctgcggacccctcgtcatcaggtgcatagcaagtgaaagcaagtgttcacaacagtgaaaagttgagcgtcatttttcttagtgtgccaagagttcgatgttggcgtttccgctgtattttcttgcagtgtgccattctgttagacattagcgttttcgttgatgagcaagacatgcttaatgcatatttcggcttgtgtatccatgcacctacctcagaaaacaagtattgtcaggtattctctccatagaacagcactaccctcctctctccccagatgtgactactgaggggaggtctgagtgtttaatttccgattttttcctctgcatttacacacacaccacacacgcacacacacacaccaagtaccagtataagcatctcccatctgcttttctccattgccatgcgacctggtcaagcccccctcactctgtttcctgttcagcatgtactcccctcatccgattccgttgtatcagtcactgacagttaataaacctttgcaaacgttcccca

SEQ ID NO: 17 - protein, 188 aa, Homo sapiens
MNGDDAFARRPRDDAQISEKLRKAFDDIAKYFSKKEWEKMKSSEKIVYVYMKLNYEVMTKLGFKVTLPPFMRSKRAADFHGNDFGNDRNHRNQVERPQMTFGSLQRIFPKIMPKKPAEEENGLKEVPEASGPQNDGKQLCPPGNPSTLEKINKTSGPKRGKHAWTHRLRERKQLVVYEEISDPEEDDE

SEQ ID NO: 18 - DNA, 1114 bp, Homo sapiens
acacgccgatttgcccttttgattcttccacaatcagggtgagactgctcccagtgccatgaacggagacgacgcctttgcaaggagacccagggatgatgctcaaatatcagagaagttacgaaaggccttcgatgatattgccaaatacttctctaagaaagagtgggaaaagatgaaatcctcggagaaaatcgtctatgtgtatatgaagctaaactatgaggtcatgactaaactaggtttcaaggtcaccctcccacctttcatgcgtagtaaacgggctgcagacttccacgggaatgattttggtaacgatcgaaaccacaggaatcaggttgaacgtcctcagatgactttcggcagcctccagagaatcttcccgaaggacccaaaagggggaaacatgcctggacccacagactgcgtgagagaaagcagctggtggtttatgaagagatcagcgaccctgaggaagatgacgagtaactcccctcggggatatgacacatgcccatgatgagaagcagaacgtggtgacctttcacgaacatgggcatggctgcggacccctcgtcatcaggtgcatagcaagtgaaagcaagtgttcacaacagtgaaaagttgagcgtcatttttcttagtgtgccaagagttcgatgttggcgtttccgctgtattttcttgcagtgtgccattctgttagacattagcgttttcgttgatgagcaagacatgcttaatgcatatttcggcttgtgtatccatgcacctacctcagaaaacaagtattgtcaggtattctctccatagaacagcactaccctcctctctccccagatgtgactactgaggggaggtctgagtgtttaatttccgattttttcctctgcatttacacacacaccacacacgcacacacacacaccaagtaccagtataagcatctcccatctgcttttctccattgccatgcgacctggtcaagcccccctcactctgtttcctgttcagcatgtactcccctcatccgattccgttgtatcagtcactgacagttaataaacctttgcaaacgttcaaaaaaaaaaaaaaaaaaaaaaaaaaaaaaaaa

SEQ ID NO: 19 - protein, 153 aa, Homo sapiens
MNGDDAFARRPRDDAQISEKLRKAFDDIAKYFSKKEWEKMKSSEKIVYVYMKLNYEVMTKLGFKVTLPPFMRSKRAADFHGNDFGNDRNHRNQVERPQMTFGSLQRIFPKDPKGGNMPGPTDCVRESSWWFMKRSATLRKMTSNSPRGYDTCP

SEQ ID NO: 20 - DNA, 1244 bp, Homo sapiens
tcagagtacgcacacgccgatttgcccttttgattcttccacaatcagggtgagactgctcccagtgccatgaacggagacgacgcctttgcaaggagacccagggatgatgctcaaatatcagagaagttacgaaaggccttcgatgatattgccaaatacttctctaagaaagagtgggaaaagatgaaatcctcggagaaaatcgtctatgtgtatatgaagctaaactatgaggtcatgactaaactaggtttcaaggtcaccctcccacctttcatgcgtagtaaacgggctgcagacttccacgggaatgattttggtaacgatcgaaaccacaggaatcaggttgaacgtcctcagatgactttcggcagcctccagagaatcttcccgaagatcatgcccaagaagccagcagaggaagaaaatggtttgaaggaagtgccagaggcatctggcccacaaaatgatgggaaacagctgtgccccccgggaaatccaagtaccttggagaagattaacaagacatctggacccaaaagggggaaacatgcctggacccacagactgcgtgagagaaagcagctggtggtttatgaagagatcagcgaccctgaggaagatgacgagtaactcccctcggggatatgacacatgcccatgatgagaagcagaacgtggtgacctttcacgaacatgggcatggctgcggacccctcgtcatcaggtgcatagcaagtgaaagcaagtgttcacaacagtgaaaagttgagcgtcatttttcttagtgtgccaagagttcgatgttggcgtttccgctgtattttcttgcagtgtgccattctgttagacattagcgttttcgttgatgagcaagacatgcttaatgcatatttcggcttgtgtatccatgcacctacctcagaaaacaagtattgtcaggtattctctccatagaacagcactaccctcctctctccccagatgtgactactgaggggaggtctgagtgtttaatttccgattttttcctctgcatttacacacacaccacacacgcacacacacacaccaagtaccagtataagcatctcccatctgcttttctccattgccatgcgacctggtcaagcccccctcactctgtttcctgttcagcatgtactcccctcatccgattccgttgtatcagtcactgacagttaataaacctttgcaaacgttcaaaaaaaaaaaaaaaa

SEQ ID NO: 21 - protein, 188 aa, Homo sapiens; identical to SEQ ID NO: 17

SEQ ID NO: 22 - DNA, 1108 bp, Homo sapiens
tcagagtacgcacacgccgatttgcccttttgattcttccacaatcagggtgagactgctcccagtgccatgaacggagacgacgcctttgcaaggagacccagggatgatgctcaaatatcagagaagttacgaaaggccttcgatgatattgccaaatacttctctaagaaagagtgggaaaagatgaaatcctcggagaaaatcgtctatgtgtatatgaagctaaactatgaggtcatgactaaactaggtttcaaggtcaccctcccacctttcatgcgtagtaaacgggctgcagacttccacgggaatgattttggtaacgatcgaaaccacaggaatcaggttgaacgtcctcagatgactttcggcagcctccagagaatcttcccgaaggacccaaaagggggaaacatgcctggacccacagactgcgtgagagaaagcagctggtggtttatgaagagatcagcgaccctgaggaagatgacgagtaactcccctcggggatatgacacatgcccatgatgagaagcagaacgtggtgacctttcacgaacatgggcatggctgcggacccctcgtcatcaggtgcatagcaagtgaaagcaagtgttcacaacagtgaaaagttgagcgtcatttttcttagtgtgccaagagttcgatgttggcgtttccgctgtattttcttgcagtgtgccattctgttagacattagcgttttcgttgatgagcaagacatgcttaatgcatatttcggcttgtgtatccatgcacctacctcagaaaacaagtattgtcaggtattctctccatagaacagcactaccctcctctctccccagatgtgactactgaggggaggtctgagtgtttaatttccgattttttcctctgcatttacacacacaccacacacgcacacacacacaccaagtaccagtataagcatctcccatctgcttttctccattgccatgcgacctggtcaagcccccctcactctgtttcctgttcagcatgtactcccctcatccgattccgttgtatcagtcactgacagttaataaacctttgcaaacgttcaaaaaaaaaaaaaaaa

SEQ ID NO: 23 - protein, 153 aa, Homo sapiens; identical to SEQ ID NO: 19

SEQ ID NO: 24 - DNA, 1270 bp, Homo sapiens
ctctttcgattcttccatactcaagagtacgcacggtctgattttctctttggattcttccaaaatcagagtcagactactccctgtgccatgaacggagatgacacctttgcaaggagacccacggttggtgctcaaataccagagaagatacaaaaggccttcgatgatattgccaaatacttctctaaggaagagtgggaaaagatgaaagtctcggagaaaatcgtctatgtgtatatgaagagaaagtatgaggccatgactaaactaggtttcaaggccatcctcccatctttcatgcgtaataaacgggtcacagacttccaggggaatgattttgataatgaccctaaccgtgggaatcaggttcaacgtcctcagatgactttcggcaggctccagggaatcttcccgaagatcatgcccaagaagccagcagaggaaggaaatgtttcgaaggaagtgccagaagcatctggcccacaaaacgatgggaaacagctgtgccccccgggaaaaccaactacctctgagaagattaacatgatatctggacccaaaaggggggaacatgcctggacccacagactgcgtgagagaaagcagctggtgatttatgaagagatcagcgatcctgaggaagatgatgagtaactccccttggggatatgacacatgcccatgatgagaagcagaacgtggtgacctttcacgaacatgggcatggctgtggacccctcgtcatcaggtgcatagcaagtgaaagcaagtgttcacaacagtgaaaagttgagcgtcatttttcttagtgtgccaagagtacgatattagcgtttccattgtattttcttgaagtgtgtcattctgttagatattaacattttcactgatgagcaagacatacttaatgcatattttggtttgtgtatccatgcacctaccttagaaaacaagtattgtcagttacctctgcatggaacagcattaccctcctctctccctagatgtgactactgagggcagttctgagtgtttaatttcagattttttcctctgcatttacacacacacacaaaccacaccacacacacacacacacacacacagacacacaccaagtaccagtataagcatctcccatctgcttttcccattgccatgcgtcctggtcaggcttccctcactctgtttcctggtcagcatgtactcccctcatccgattcccctgtagcagtcactgacagtaaataaacctttgcaaacgttc

SEQ ID NO: 25 - protein, 188 aa, Homo sapiens
MNGDDTFARRPTVGAQIPEKIQKAFDDIAKYFSKEEWEKMKVSEKIVYVYMKRKYEAMTKLGFKAILPSFMRNKRVTDFQGNDFDNDPNRGNQVQRPQMTFGRLQGIFPKIMPKKPAEEGNVSKEVPEASGPQNDGKQLCPPGKPTTSEKINMISGPKRGEHAWTHRLRERKQLVIYEEISDPEEDDE

SEQ ID NO: 26 - DNA, 1416 bp, Homo sapiens
ctctctctctcgatttttccacagagtacgcacgctctgattgtttcgattcttccaaaatcagagacagagtgctcccggtgccatgaacggagacgatgcctttgtacggagacctagggttggttctcaaataccagagaagatgcaaaagcatccctggagacaagtctgtgaccgtggaatacatttggtgaatctcagtccgttctggaaggtgggaagagagccagccagcagcattaaagctctactgtgtggcaggggagaagctagggccttcgatgatattgccaaatacttctctgagaaagagtgggaaaagatgaaagcctcggagaaaatcatctatgtgtatatgaagagaaagtatgaggccatgactaaactaggtttcaaggccaccctcccacctttcatgcgtaataaacgggtcgcagacttccaggggaatgattttgataatgaccctaaccgtgggaatcaggttgaacatcctcagatgactttcggcaggctccagggaatcttcccgaagatcacgcccgagaagccagcagaggaaggaaatgattcgaagggagtgccagaagcatctggcccacagaacaatgggaaacagctgcgcccctcaggaaaactaaatacctctgagaaggttaacaagacatctggacccaaaagggggaaacatgcctggacccacagagtgcgtgagagaaagcaactggtgatttatgaagagatcagcgaccctcaggaagatgacgagtaactcccctcggggatatgacacatgcccatgatgagaagcagaacgtggtgacctttcacgaacatgggcatggctgcggatccctcgtcatcaggtgtatagcaagtgaaagcaagtgttcacaacagtgaaaagttgagcgtcatttttcttagtgtgccaagagttcgatgttagtgtttctgttgtattttgttacagtgtgccattctgttagatattagcgttttcactgatgagcaagacatacttaatgcatatttcagtttgtgtatccatgcacctacctcagaaaacaagtatcgtcaggtattctctgcatagaacaacactaccctcctctcttcccagatgtgaccactgagggcagttctgagtgtttaatttcagattttttcctctgcatttacacaaacacacacacatgccacacagacacacatgcgcgcgcgcgcgcacacacacacacacacacacacacacacacacacacaccaagtaccagtataggcatctcccaactgcttttccccatgtgtcctggtcaagcccccctcactctgtttcctgttcagcatgtactcccctcatccgattcccctctatcagtcactgccagttaataaacctttgcaaacgtt

SEQ ID NO: 27 - protein, 229 aa, Homo sapiens
MNGDDAFVRRPRVGSQIPEKMQKHPWRQVCDRGIHLVNLSPFWKVGREPASSIKALLCGRGEARAFDDIAKYFSEKEWEKMKASEKIIYVYMKRKYEAMTKLGFKATLPPFMRNKRVADFQGNDFDNDPNRGNQVEHPQMTFGRLQGIFPKITPEKPAEEGNDSKGVPEASGPQNNGKQLRPSGKLNTSEKVNKTSGPKRGKHAWTHRVRERKQLVIYEEISDPQEDDE

SEQ ID NO: 28 - DNA, 1276 bp, Homo sapiens
cgctctgattgtttcgattcttccaaaatcagagacagagtgctcccggtgccatgaacggagacgatgcctttgtacggagacctagggttggttctcaaataccagagaagatgcaaaaggccttcgatgatattgccaaatacttctctgagaaagagtgggaaaagatgaaagcctcggagaaaatcatctatgtgtatatgaagagaaagtatgaggccatgactaaactaggtttcaaggccaccctcccacctttcatgcgtaataaacgggtcgcagacttccaggggaatgattttgataatgaccctaaccgtgggaatcaggttgaacatcctcagatgactttcggcaggctccagggaatcttcccgaagatcacgcccgagaagccagcagaggaaggaaatgattcgaagggagtgccagaagcatctggcccacagaacaatgggaaacagctgcgcccctcaggaaaactaaatacctctgagaaggttaacaagacatctggacccaaaagggggaaacatgcctggacccacagagtgcgtgagagaaagcaactggtgatttatgaagagatcagcgaccctcaggaagatgacgagtaactcccctcggggatatgacacatgcccatgatgagaagcagaacgtggtgacctttcacgaacatgggcatggctgcggatccctcgtcatcaggtgtatagcaagtgaaagcaagtgttcacaacagtgaaaagttgagcgtcatttttcttagtgtgccaagagttcgatgttagtgtttctgttgtattttgttacagtgtgccattctgttagatattagcgttttcactgatgagcaagacatacttaatgcatatttcagtttgtgtatccatgcacctacctcagaaaacaagtatcgtcaggtattctctgcatagaacaacactaccctcctctcttcccagatgtgaccactgagggcagttctgagtgtttaatttcagattttttcctctgcatttacacaaacacacacacatgccacacagacacacatgcgcgcgcgcgcgcacacacacacacacacacacacacacacacacacacaccaagtaccagtataggcatctcccaactgcttttccccatgtgtcctggtcaagcccccctcactctgtttcctgttcagcatgtactcccctcatccgattcccctctatcagtcactgccagttaataaacctttgcaaacgttaaaaaaaaaaaaaaa

SEQ ID NO: 29 - protein, 188 aa, Homo sapiens
MNGDDAFVRRPRVGSQIPEKMQKAFDDIAKYFSEKEWEKMKASEKIIYVYMKRKYEAMTKLGFKATLPPFMRNKRVADFQGNDFDNDPNRGNQVEHPQMTFGRLQGIFPKITPEKPAEEGNDSKGVPEASGPQNNGKQLRPSGKLNTSEKVNKTSGPKRGKHAWTHRVRERKQLVIYEEISDPQEDDE

SEQ ID NO: 30 - DNA, 1340 bp, Homo sapiens
ccaggctccagggacagaaccttctcaaagtgggggtggagactctgattttcccgcctaaagcatcccctgggattggctactttaagttcagagtatgcatgctctgactttctctctcgattcttccatactcagagtcagactgctcctggtgccatgaacggagacgacgcctttgcaaggagacctagggctggtgctcaaataccagagaagatccaaaagtccttcgatgatattgccaaatacttctctaagaaagagtgggaaaagatgaaatccttggagaaaatcagctatgtgtatatgaagagaaagtatgaggccatgactaaactaggcttcaaggccaccctcccacctttcatgcataatacaggggccacagacctccaggggaatgattttgataatgaccgtaaccaagggaatcaggttgaacgtcctcagatgactttttgcaggctccagagaatcttcccgaagatcatgcccaagaagccagcagaggaaggaaatgattcgaagggagtgccagaagcatctggctcacagaacgatgggaaacacctgtgccctccaggaaaaccaagtacctctgagaagattaacaagacatccggacccaaaagggggaaacatgcctggacccacagactgcgtgagagaaagcagctggtgatttatgaagagatcagcgaccctgaagaagacgacgagtaactcccctcggggatacgacatatgcccatgatgagaagcagaacgtggtgacctttcacgaacatgggcatggctgcggacccctcgtcatcaggtgcatagcaagtgaaagcaagtgttcacaacagtgaaaagttgagcgtcgtttttcttagtgtgacaagagttcgatgttagtgtttccattgtattttcttacagtgtgccattctgttagatattagcgttttcattgatgagcaagacatgcttaatgtgtatttcggtttgtgtatccatgcacctacctcagaaagcaagtatagtcaggtattctctccatagaacagcactaccctcctctctccccagatgtgactactgagggcagatctgagtgtttaatttccgattttcccctctgcatttacacaccagacacacaaacacacacacacagacacacacacacacagacacaccaagtaccagtataagcatctcccatatgcttttccccattgccatgagtcctggtcaagccccccttcaatttgtttcctgttcagcatgtactcccctcctctgattccccgtatcagtcactgacagttaatacacctttgcaaacgttc

SEQ ID NO: 31 - protein, 188 aa, Homo sapiens
MNGDDAFARRPRAGAQIPEKIQKSFDDIAKYFSKKEWEKMKSLEKISYVYMKRKYEAMTKLGFKATLPPFMHNTGATDLQGNDFDNDRNQGNQVERPQMTFCRLQRIFPKIMPKKPAEEGNDSKGVPEASGSQNDGKHLCPPGKPSTSEKINKTSGPKRGKHAWTHRLRERKQLVIYEEISDPEEDDE

SEQ ID NO: 32 - DNA, 3440 bp, Homo sapiens
gagaggccggcgtctctcccccagtttgccgttcacccggagcgctcgggacttgccgatagtggtgacggcggcaacatgtctgtggctttcgcggccccgaggcagcgaggcaagggggagatcactcccgctgcgattcagaagatgttggatgacaataaccatcttattcagtgtataatggactctcagaataaaggaaagacctcagagtgttctcagtatcagcagatgttgcacacaaacttggtataccttgctacaatagcagattctaatcaaaatatgcagtctcttttaccagcaccacccacacagaatatgcctatgggtcctggagggatgaatcagagcggccctcccccacctccacgctctcacaacatgccttcagatggaatggtaggtgggggtcctcctgcaccgcacatgcagaaccagatgaacggccagatgcctgggcctaaccatatgcctatgcagggacctggacccaatcaactcaatatgacaaacagttccatgaatatgccttcaagtagccatggatccatgggaggttacaaccattctgtgccatcatcacagagcatgccagtacagaatcagatgacaatgagtcagggacaaccaatgggaaactatggtcccagaccaaatatgagtatgcagccaaaccaaggtccaatgatgcatcagcagcctccttctcagcaatacaatatgccacagggaggcggacagcattaccaaggacagcagccacctatgggaatgatgggtcaagttaaccaaggcaatcatatgatgggtcagagacagattcctccctatagacctcctcaacagggcccaccacagcagtactcaggccaggaagactattacggggaccaatacagtcatggtggacaaggtcctccagaaggcatgaaccagcaatattaccctgatggtcataatgattacggttatcagcaaccgtcgtatcctgaacaaggctacgataggccttatgaggattcctcacaacattactacgaaggaggaaattcacagtatggccaacagcaagatgcataccagggaccacctccacaacagggatatccaccccagcagcagcagtacccagggcagcaaggttacccaggacagcagcagggctacggtccttcacagggtggtccaggtcctcagtatcctaactacccacagggacaaggtcagcagtatggaggatatagaccaacacagcctggaccaccacagccaccccagcagaggccttatggatatgaccagggacagtatggaaattaccagcagtgaaaaagtacttacattccagtagccagtatctattagcagccatattgtcacctcagcactgtggacacctccctgtgaagagatccttccattccatctagtttttggaaaaaccttgtggataagtggctgtttcatcagtaagcagcctttgtggtttagttataaaaggctttagtagctcaaaaatactcttgatttcacatttctactctagatggcaacattggacagaaaatgcaatgacataaccaatttgtaatgattttggaactgtgtttcaaatggactgttacagactgaaaggtgtgaacagctttgtatgtttatgaagggtaagggaatttaatacttttccacagatttttttgtaaggggaagagggaaatgtacactttttacagcagcaatattttgtatattatgtttatttcatgtggtgaatatgcaaggcggtacactacgcactggacagcatcagaaatcctctgttaatgtggactggaacatggtagatgcttgattgttttggtctcaaaatggtgtgctataaagataaaggtgaggggaagacaaagcacaccatatgtccactgttctgttctcatagaggaaattcaaatcccttttatctattagataatcaagggcactgtgatacagttttgagtaaaaagacattttttaaaagccttccagttttgtggattaaacctttttataaagatcatttataatactgttttaaaatgtgaggcaataagaattactttgtgttggatctgaggaggctttggtaaaacagtttcatctaaatgaaagtggtaatcctcttctaaaatagcaataactgaaaatgaaagtgttaattttaccttgtttgagttatcagggaacttagtaagtaatatcaaagcattttataaatgatatcaaagaagagtcaacattgatccagtcattttattttgtaatattgagggataattggttattaaactgaatagttcaggagactttacaaacctttgtttcaactttcttatctggaaataatatcatttataaagggacacttttatgtttttcccttttttatgttggttgatataacacaaagagatatttaggaaaatgcttattgatgaggtttattctatctgtttttaaagcaccgaggttgcattctagataaccttgtttattagcatggcatattttaatcattatttgagactgtcctgtgcctgattattttagctaaattcagggagattgcgtggggcaggaaagcatgcattgaaaaatttctaaccacggttatttaagcataatctgaaaacatctagcccaaaggtaagttgctattttcatcacagttgcctatgcccagggaataagatgtattctttataattgaattggtttttcccacgtctaactggaaacaaaacagaaggggcgtcataaatttgaataagcagaacatactgttctcaacatactgtaatcaaaaggaggaatttcagtgggtctctgtgtgtgtatgagagagagagtgtgtgtttgtgtgtttcaaggtcagaacaggtttttttgtttttgttttttgttctttgtttttttttttgagatggagtcttgctcttgtcgcccaggctggagtgcagtggcgcaatctcagctcactgcaacctccgcctcccaggttcaagcagttctcctgcctcagcctcctgagtagctgggatgacaggcacccgccaccacacccagctaatttttgtacttttagtagagacgaggtttcgccatgttggccaggctggtctcgaactcctgacctcaggtgatccacccgcctcggccttccaaagtgctgggattacaggcgtgagccaccgtgcctggccagaataggttttttctttcaacttgatcagtagaaaatggacatcaagtttgaacagataaatcatggacagccttattgtgattgaaatgcttgtaggttctgtgccaattttccaccactgtgtactttgttgctatttaaaactgtatcaactctaacggaagaataaattatttgtgattttaaaaaa

SEQ ID NO: 33 - protein, 418 aa, Homo sapiens
MSVAFAAPRQRGKGEITPAAIQKMLDDNNHLIQCIMDSQNKGKTSECSQYQQMLHTNLVYLATIADSNQNMQSLLPAPPTQNMPMGPGGMNQSGPPPPPRSHNMPSDGMVGGGPPAPHMQNQMNGQMPGPNHMPMQGPGPNQLNMTNSSMNMPSSSHGSMGGYNHSVPSSQSMPVQNQMTMSQGQPMGNYGPRPNMSMQPNQGPMMHQQPPSQQYNMPQGGGQHYQGQQPPMGMMGQVNQGNHMMGQRQIPPYRPPQQGPPQQYSGQEDYYGDQYSHGGQGPPEGMNQQYYPDGHNDYGYQQPSYPEQGYDRPYEDSSQHYYEGGNSQYGQQQDAYQGPPPQQGYPPQQQQYPGQQGYPGQQQGYGPSQGGPGPQYPNYPQGQGQQYGGYRPTQPGPPQPPQQRPYGYDQGQYGNYQQ

SEQ ID NO: 34 - DNA, 3347 bp, Homo sapiens
gagaggccggcgtctctcccccagtttgccgttcacccggagcgctcgggacttgccgatagtggtgacggcggcaacatgtctgtggctttcgcggccccgaggcagcgaggcaagggggagatcactcccgctgcgattcagaagatgttggatgacaataaccatcttattcagtgtataatggactctcagaataaaggaaagacctcagagtgttctcagtatcagcagatgttgcacacaaacttggtataccttgctacaatagcagattctaatcaaaatatgcagtctcttttaccagcaccacccacacagaatatgcctatgggtcctggagggatgaatcagagcggccctcccccacctccacgctctcacaacatgccttcagatggaatggtaggtgggggtcctcctgcaccgcacatgcagaaccagatgaacggccagatgcctgggcctaaccatatgcctatgcagggacctggacccaatcaactcaatatgacaaacagttccatgaatatgccttcaagtagccatggatccatgggaggttacaaccattctgtgccatcatcacagagcatgccagtacagaatcagatgacaatgagtcagggacaaccaatgggaaactatggtcccagaccaaatatgagtatgcagccaaaccaaggtccaatgatgcatcagcagcctccttctcagcaatacaatatgccacagggaggcggacagcattaccaaggacagcagccacctatgggaatgatgggtcaagttaaccaaggcaatcatatgatgggtcagagacagattcctccctatagacctcctcaacagggcccaccacagcagtactcaggccaggaagactattacggggaccaatacagtcatggtggacaaggtcctccagaaggcatgaaccagcaatattaccctgatggaaattcacagtatggccaacagcaagatgcataccagggaccacctccacaacagggatatccaccccagcagcagcagtacccagggcagcaaggttacccaggacagcagcagggctacggtccttcacagggtggtccaggtcctcagtatcctaactacccacagggacaaggtcagcagtatggaggatatagaccaacacagcctggaccaccacagccaccccagcagaggccttatggatatgaccagggacagtatggaaattaccagcagtgaaaaagtacttacattccagtagccagtatctattagcagccatattgtcacctcagcactgtggacacctccctgtgaagagatccttccattccatctagtttttggaaaaaccttgtggataagtggctgtttcatcagtaagcagcctttgtggtttagttataaaaggctttagtagctcaaaaatactcttgatttcacatttctactctagatggcaacattggacagaaaatgcaatgacataaccaatttgtaatgattttggaactgtgtttcaaatggactgttacagactgaaaggtgtgaacagctttgtatgtttatgaagggtaagggaatttaatacttttccacagatttttttgtaaggggaagagggaaatgtacactttttacagcagcaatattttgtatattatgtttatttcatgtggtgaatatgcaaggcggtacactacgcactggacagcatcagaaatcctctgttaatgtggactggaacatggtagatgcttgattgttttggtctcaaaatggtgtgctataaagataaaggtgaggggaagacaaagcacaccatatgtccactgttctgttctcatagaggaaattcaaatcccttttatctattagataatcaagggcactgtgatacagttttgagtaaaaagacattttttaaaagccttccagttttgtggattaaacctttttataaagatcatttataatactgttttaaaatgtgaggcaataagaattactttgtgttggatctgaggaggctttggtaaaacagtttcatctaaatgaaagtggtaatcctcttctaaaatagcaataactgaaaatgaaagtgttaattttaccttgtttgagttatcagggaacttagtaagtaatatcaaagcattttataaatgatatcaaagaagagtcaacattgatccagtcattttattttgtaatattgagggataattggttattaaactgaatagttcaggagactttacaaacctttgtttcaactttcttatctggaaataatatcatttataaagggacacttttatgtttttcccttttttatgttggttgatataacacaaagagatatttaggaaaatgcttattgatgaggtttattctatctgtttttaaagcaccgaggttgcattctagataaccttgtttattagcatggcatattttaatcattatttgagactgtcctgtgcctgattattttagctaaattcagggagattgcgtggggcaggaaagcatgcattgaaaaatttctaaccacggttatttaagcataatctgaaaacatctagcccaaaggtaagttgctattttcatcacagttgcctatgcccagggaataagatgtattctttataattgaattggtttttcccacgtctaactggaaacaaaacagaaggggcgtcataaatttgaataagcagaacatactgttctcaacatactgtaatcaaaaggaggaatttcagtgggtctctgtgtgtgtatgagagagagagtgtgtgtttgtgtgtttcaaggtcagaacaggtttttttgtttttgttttttgttctttgtttttttttttgagatggagtcttgctcttgtcgcccaggctggagtgcagtggcgcaatctcagctcactgcaacctccgcctcccaggttcaagcagttctcctgcctcagcctcctgagtagctgggatgacaggcacccgccaccacacccagctaatttttgtacttttagtagagacgaggtttcgccatgttggccaggctggtctcgaactcctgacctcaggtgatccacccgcctcggccttccaaagtgctgggattacaggcgtgagccaccgtgcctggccagaataggttttttctttcaacttgatcagtagaaaatggacatcaagtttgaacagataaatcatggacagccttattgtgattgaaatgcttgtaggttctgtgccaattttccaccactgtgtactttgttgctatttaaaactgtatcaactctaacggaagaataaattatttgtgattttaaaaaa

SEQ ID NO: 35 - protein, 387 aa, Homo sapiens
MSVAFAAPRQRGKGEITPAAIQKMLDDNNHLIQCIMDSQNKGKTSECSQYQQMLHTNLVYLATIADSNQNMQSLLPAPPTQNMPMGPGGMNQSGPPPPPRSHNMPSDGMVGGGPPAPHMQNQMNGQMPGPNHMPMQGPGPNQLNMTNSSMNMPSSSHGSMGGYNHSVPSSQSMPVQNQMTMSQGQPMGNYGPRPNMSMQPNQGPMMHQQPPSQQYNMPQGGGQHYQGQQPPMGMMGQVNQGNHMMGQRQIPPYRPPQQGPPQQYSGQEDYYGDQYSHGGQGPPEGMNQQYYPDGNSQYGQQQDAYQGPPPQQGYPPQQQQYPGQQGYPGQQQGYGPSQGGPGPQYPNYPQGQGQQYGGYRPTQPGPPQPPQQRPYGYDQGQYGNYQQ

SEQ ID NO: 36 - DNA, 3415 bp, Homo sapiens
ccttccacctctgccctatctcggcagatgctccacggatttgcacgaactcccgagtcttgacctccctcccctctccgggctgccgggacaactcggggcggccactcttgccaggaggcatgttggatgacaataaccatcttattcagtgtataatggactctcagaataaaggaaagacctcagagtgttctcagtatcagcagatgttgcacacaaacttggtataccttgctacaatagcagattctaatcaaaatatgcagtctcttttaccagcaccacccacacagaatatgcctatgggtcctggagggatgaatcagagcggccctcccccacctccacgctctcacaacatgccttcagatggaatggtaggtgggggtcctcctgcaccgcacatgcagaaccagatgaacggccagatgcctgggcctaaccatatgcctatgcagggacctggacccaatcaactcaatatgacaaacagttccatgaatatgccttcaagtagccatggatccatgggaggttacaaccattctgtgccatcatcacagagcatgccagtacagaatcagatgacaatgagtcagggacaaccaatgggaaactatggtcccagaccaaatatgagtatgcagccaaaccaaggtccaatgatgcatcagcagcctccttctcagcaatacaatatgccacagggaggcggacagcattaccaaggacagcagccacctatgggaatgatgggtcaagttaaccaaggcaatcatatgatgggtcagagacagattcctccctatagacctcctcaacagggcccaccacagcagtactcaggccaggaagactattacggggaccaatacagtcatggtggacaaggtcctccagaaggcatgaaccagcaatattaccctgatggtcataatgattacggttatcagcaaccgtcgtatcctgaacaaggctacgataggccttatgaggattcctcacaacattactacgaaggaggaaattcacagtatggccaacagcaagatgcataccagggaccacctccacaacagggatatccaccccagcagcagcagtacccagggcagcaaggttacccaggacagcagcagggctacggtccttcacagggtggtccaggtcctcagtatcctaactacccacagggacaaggtcagcagtatggaggatatagaccaacacagcctggaccaccacagccaccccagcagaggccttatggatatgaccagggacagtatggaaattaccagcagtgaaaaagtacttacattccagtagccagtatctattagcagccatattgtcacctcagcactgtggacacctccctgtgaagagatccttccattccatctagtttttggaaaaaccttgtggataagtggctgtttcatcagtaagcagcctttgtggtttagttataaaaggctttagtagctcaaaaatactcttgatttcacatttctactctagatggcaacattggacagaaaatgcaatgacataaccaatttgtaatgattttggaactgtgtttcaaatggactgttacagactgaaaggtgtgaacagctttgtatgtttatgaagggtaagggaatttaatacttttccacagatttttttgtaaggggaagagggaaatgtacactttttacagcagcaatattttgtatattatgtttatttcatgtggtgaatatgcaaggcggtacactacgcactggacagcatcagaaatcctctgttaatgtggactggaacatggtagatgcttgattgttttggtctcaaaatggtgtgctataaagataaaggtgaggggaagacaaagcacaccatatgtccactgttctgttctcatagaggaaattcaaatcccttttatctattagataatcaagggcactgtgatacagttttgagtaaaaagacattttttaaaagccttccagttttgtggattaaacctttttataaagatcatttataatactgttttaaaatgtgaggcaataagaattactttgtgttggatctgaggaggctttggtaaaacagtttcatctaaatgaaagtggtaatcctcttctaaaatagcaataactgaaaatgaaagtgttaattttaccttgtttgagttatcagggaacttagtaagtaatatcaaagcattttataaatgatatcaaagaagagtcaacattgatccagtcattttattttgtaatattgagggataattggttattaaactgaatagttcaggagactttacaaacctttgtttcaactttcttatctggaaataatatcatttataaagggacacttttatgtttttcccttttttatgttggttgatataacacaaagagatatttaggaaaatgcttattgatgaggtttattctatctgtttttaaagcaccgaggttgcattctagataaccttgtttattagcatggcatattttaatcattatttgagactgtcctgtgcctgattattttagctaaattcagggagattgcgtggggcaggaaagcatgcattgaaaaatttctaaccacggttatttaagcataatctgaaaacatctagcccaaaggtaagttgctattttcatcacagttgcctatgcccagggaataagatgtattctttataattgaattggtttttcccacgtctaactggaaacaaaacagaaggggcgtcataaatttgaataagcagaacatactgttctcaacatactgtaatcaaaaggaggaatttcagtgggtctctgtgtgtgtatgagagagagagtgtgtgtttgtgtgtttcaaggtcagaacaggtttttttgtttttgttttttgttctttgtttttttttttgagatggagtcttgctcttgtcgcccaggctggagtgcagtggcgcaatctcagctcactgcaacctccgcctcccaggttcaagcagttctcctgcctcagcctcctgagtagctgggatgacaggcacccgccaccacacccagctaatttttgtacttttagtagagacgaggtttcgccatgttggccaggctggtctcgaactcctgacctcaggtgatccacccgcctcggccttccaaagtgctgggattacaggcgtgagccaccgtgcctggccagaataggttttttctttcaacttgatcagtagaaaatggacatcaagtttgaacagataaatcatggacagccttattgtgattgaaatgcttgtaggttctgtgccaattttccaccactgtgtactttgttgctatttaaaactgtatcaactctaacggaagaataaattatttgtgattttaaaaaa

SEQ ID NO: 37 - protein, 395 aa, Homo sapiens
MLDDNNHLIQCIMDSQNKGKTSECSQYQQMLHTNLVYLATIADSNQNMQSLLPAPPTQNMPMGPGGMNQSGPPPPPRSHNMPSDGMVGGGPPAPHMQNQMNGQMPGPNHMPMQGPGPNQLNMTNSSMNMPSSSHGSMGGYNHSVPSSQSMPVQNQMTMSQGQPMGNYGPRPNMSMQPNQGPMMHQQPPSQQYNMPQGGGQHYQGQQPPMGMMGQVNQGNHMMGQRQIPPYRPPQQGPPQQYSGQEDYYGDQYSHGGQGPPEGMNQQYYPDGHNDYGYQQPSYPEQGYDRPYEDSSQHYYEGGNSQYGQQQDAYQGPPPQQGYPPQQQQYPGQQGYPGQQQGYGPSQGGPGPQYPNYPQGQGQQYGGYRPTQPGPPQPPQQRPYGYDQGQYGNYQQ

SEQ ID NO: 38 - protein, 418 aa, Mus musculus
MSVAFAAPRQRGKGEITPAAIQKMLDENNHLIQCIMDYQNKGKASECSQYQQILHTNLVYLATIADSNQNMQSLLPAPPTQTMPMGPGGMSQSGPPPPPRSHNMPSDGMVGGGPPAPHMQNQMNGQMPGPNHMPMQGPGPSQLSMTNSSMNMPSSSHGSMGGYNHSVPSSQSMPVQNQMTMSQGQPMGNYGPRPNMNMQPNQGPMMHQQPPSQQYNMPPGGAQHYQGQQAPMGLMGQVNQGSHMMGQRQMPPYRPPQQGPPQQYSGQEDYYGDQYSHGGQGPPEGMNQQYYPDGHNDYGYQQPSYPEQGYDRPYEDSSQHYYEGGNSQYGQQQDAYQGPPPQQGYPPQQQQYPGQQGYPGQQQSYGPSQGGPGPQYPNYPQGQGQQYGGYRPTQPGPPQPPQQRPYGYDQGQYGNYQQ

SEQ ID NO: 39 - DNA, 3110 bp, Mus musculus
ccttgctgggagctgcggctcagcgttaaggccaagccggccagcgagggacgcggcccgggagcatcctccccccaccgcgcgccctaaggtggaactgcccggaggcgggcgtcgggcccccagctccgcgggccctggagcgctcgggactcgctgatcgcgggctcggcggcaacatgtctgtggcgttcgcagccccgaggcagcggggcaagggcgaaatcacgcccgccgccatccagaagatgctggatgaaaacaaccatcttattcagtgtataatggactatcagaacaaagggaaggcctcggagtgctcgcagtatcagcagatattgcatacaaacctggtataccttgctacaatagcagactctaatcaaaatatgcagtctctcttaccagcaccgcccacacagactatgccaatgggtcctggagggatgagtcagagtggccctccaccccctccccgctctcacaacatgccttcagatggaatggtgggtgggggccctcctgcaccacacatgcagaaccagatgaacggccagatgcctgggcctaaccatatgccaatgcagggacctggacccagtcagctcagcatgacaaacagctccatgaatatgccttcaagtagccatggctccatgggaggttacaaccattctgtgccgtcatcccagagcatgcccgtgcagaaccagatgacaatgagtcaggggcagccaatgggaaactatggtcccagaccaaacatgaatatgcaaccaaatcaagggccgatgatgcaccagcagcctccttctcagcagtacaatatgccacctggaggggcacagcattaccaaggacagcaggcgcccatggggctgatgggccaagttaaccaaggcagtcacatgatgggccagcgacagatgcctccctacagacctccgcaacagggcccaccacagcagtactcaggccaggaagactattatggggaccaatacagtcatggtggacaaggtcctccagaaggcatgaaccagcaatattaccctgatggtcataatgattacggttatcagcaaccgtcgtatcctgaacaaggctacgataggccttatgaggattcctcacaacattactacgaaggaggaaactcccagtatggccaacagcaagacgcttaccagggaccacctccacagcaaggatacccaccccagcagcagcagtacccgggacagcagggatacccagggcagcagcagagctatggtccttcgcagggcggtccaggtcctcagtatcctaattatcctcagggtcaaggtcagcagtatgggggctatagaccaacacagccaggaccaccccagccaccccagcagaggccttatgggtacgaccagggacagtatggaaattaccagcagtgaaaatgtccttacattccaatagccagtacctattagcaggcacgttgtcacagcactgcaccatggacacccccctgggaagactccttccattccagctaggtttttgggaaaacctttggctaagtggctgcttcgtcagcaagtagctgttatggtttagtttgtaaaggcttcgtagctaccgatgcacctgatttcacgtttctactctagatggcaacattggacagaaaatgcattgacgtgaggagtttgcagcggtttcagaactgtgctgcaaatggactgtcacagcctgaaaggtgtgagcagctgggtgtgtgttcgcggagcttcagggggtttcatacttttccaccgattattttgtaaggggaagggggaaatgtacactttttacagcagcaatattttgtctattatgtttatttcatgtgataaatatgcaaagcggtacactacacactgggcagaatcagaacccctgttaatgtggagtgtggtagatgctcggtgctgtggtgctctgaagacaggcgaggggaggcagaagcccaccacaggcccgctgttagttcttagaggaaactcctctctctcttatctaccagattagcaagggcgctgtgatacagttttttgagtacaaagacattttttaaaaagccttccagttttgtgcattaaaacctttttgtaaatatggtttataatactgttttcaaacgcaaggcaataattatgttgcatctgtgaactttggcaggtttgtgtaaaaggagggaagcctctcttaaaacagcaataacagaaaaggaggaagcgggatgtttttaccttgtcttgtaatcagggagctctcaccacgtcagagaggaggcagcattggtctcaccttactgttttttacattaccatgattggttcatggagcagggaggagtccacgagacttcacacgcttgtgctttaactttcttaactgggcacaagcaaagggcgccttcgtgttcctctcttcatcttagttaatgcgcgaggaaaatgctttgatggccatttctcattcgcactgaaagccgagaggtgacattttacggtttcttgtttttaagcacgacatacttaatcattatttgagactgattattttagctaaatttggggatatgccatggggcaagaaaacatgtactgagagatttctaaacacatctatttaagcatactttaaaaatatctagcccaaaggtaagttgctgtatcctcacagttgtctgcatccagggaatatgactgaatataacatatctttgtaattgaattagtttttgccacttctaactgaaaacagaacagaaggagtgccataaatgcaaagaagcaaagtgtactgttgtcaacatactgtaatcagaggaggggtttcaatgtgtctggatgagagtgtgtgtgtttaaggtcagagtatagggtgttcttcaacttggacagtagaaaataggcatcaagtgtgaaccggtgaggcgtggacagccttcttgtgactgagatgcttgtaagttctgtgccaggttctccaccactgtgtactttattgctatttaaaactgtatcaactctaacgaaagaataaattatttgtgattttaaaaaaaaaaaaaaaaaaaa

SEQ ID NO: 40 - protein, 387 aa, Mus musculus
MSVAFAAPRQRGKGEITPAAIQKMLDENNHLIQCIMDYQNKGKASECSQYQQILHTNLVYLATIADSNQNMQSLLPAPPTQTMPMGPGGMSQSGPPPPPRSHNMPSDGMVGGGPPAPHMQNQMNGQMPGPNHMPMQGPGPSQLSMTNSSMNMPSSSHGSMGGYNHSVPSSQSMPVQNQMTMSQGQPMGNYGPRPNMNMQPNQGPMMHQQPPSQQYNMPPGGAQHYQGQQAPMGLMGQVNQGSHMMGQRQMPPYRPPQQGPPQQYSGQEDYYGDQYSHGGQGPPEGMNQQYYPDGNSQYGQQQDAYQGPPPQQGYPPQQQQYPGQQGYPGQQQSYGPSQGGPGPQYPNYPQGQGQQYGGYRPTQPGPPQPPQQRPYGYDQGQYGNYQQ

SEQ ID NO: 41 - DNA, 3017 bp, Mus musculus
ccttgctgggagctgcggctcagcgttaaggccaagccggccagcgagggacgcggcccgggagcatcctccccccaccgcgcgccctaaggtggaactgcccggaggcgggcgtcgggcccccagctccgcgggccctggagcgctcgggactcgctgatcgcgggctcggcggcaacatgtctgtggcgttcgcagccccgaggcagcggggcaagggcgaaatcacgcccgccgccatccagaagatgctggatgaaaacaaccatcttattcagtgtataatggactatcagaacaaagggaaggcctcggagtgctcgcagtatcagcagatattgcatacaaacctggtataccttgctacaatagcagactctaatcaaaatatgcagtctctcttaccagcaccgcccacacagactatgccaatgggtcctggagggatgagtcagagtggccctccaccccctccccgctctcacaacatgccttcagatggaatggtgggtgggggccctcctgcaccacacatgcagaaccagatgaacggccagatgcctgggcctaaccatatgccaatgcagggacctggacccagtcagctcagcatgacaaacagctccatgaatatgccttcaagtagccatggctccatgggaggttacaaccattctgtgccgtcatcccagagcatgcccgtgcagaaccagatgacaatgagtcaggggcagccaatgggaaactatggtcccagaccaaacatgaatatgcaaccaaatcaagggccgatgatgcaccagcagcctccttctcagcagtacaatatgccacctggaggggcacagcattaccaaggacagcaggcgcccatggggctgatgggccaagttaaccaaggcagtcacatgatgggccagcgacagatgcctccctacagacctccgcaacagggcccaccacagcagtactcaggccaggaagactattatggggaccaatacagtcatggtggacaaggtcctccagaaggcatgaaccagcaatattaccctgatggaaactcccagtatggccaacagcaagacgcttaccagggaccacctccacagcaaggatacccaccccagcagcagcagtacccgggacagcagggatacccagggcagcagcagagctatggtccttcgcagggcggtccaggtcctcagtatcctaattatcctcagggtcaaggtcagcagtatgggggctatagaccaacacagccaggaccaccccagccaccccagcagaggccttatgggtacgaccagggacagtatggaaattaccagcagtgaaaatgtccttacattccaatagccagtacctattagcaggcacgttgtcacagcactgcaccatggacacccccctgggaagactccttccattccagctaggtttttgggaaaacctttggctaagtggctgcttcgtcagcaagtagctgttatggtttagtttgtaaaggcttcgtagctaccgatgcacctgatttcacgtttctactctagatggcaacattggacagaaaatgcattgacgtgaggagtttgcagcggtttcagaactgtgctgcaaatggactgtcacagcctgaaaggtgtgagcagctgggtgtgtgttcgcggagcttcagggggtttcatacttttccaccgattattttgtaaggggaagggggaaatgtacactttttacagcagcaatattttgtctattatgtttatttcatgtgataaatatgcaaagcggtacactacacactgggcagaatcagaacccctgttaatgtggagtgtggtagatgctcggtgctgtggtgctctgaagacaggcgaggggaggcagaagcccaccacaggcccgctgttagttcttagaggaaactcctctctctcttatctaccagattagcaagggcgctgtgatacagttttttgagtacaaagacattttttaaaaagccttccagttttgtgcattaaaacctttttgtaaatatggtttataatactgttttcaaacgcaaggcaataattatgttgcatctgtgaactttggcaggtttgtgtaaaaggagggaagcctctcttaaaacagcaataacagaaaaggaggaagcgggatgtttttaccttgtcttgtaatcagggagctctcaccacgtcagagaggaggcagcattggtctcaccttactgttttttacattaccatgattggttcatggagcagggaggagtccacgagacttcacacgcttgtgctttaactttcttaactgggcacaagcaaagggcgccttcgtgttcctctcttcatcttagttaatgcgcgaggaaaatgctttgatggccatttctcattcgcactgaaagccgagaggtgacattttacggtttcttgtttttaagcacgacatacttaatcattatttgagactgattattttagctaaatttggggatatgccatggggcaagaaaacatgtactgagagatttctaaacacatctatttaagcatactttaaaaatatctagcccaaaggtaagttgctgtatcctcacagttgtctgcatccagggaatatgactgaatataacatatctttgtaattgaattagtttttgccacttctaactgaaaacagaacagaaggagtgccataaatgcaaagaagcaaagtgtactgttgtcaacatactgtaatcagaggaggggtttcaatgtgtctggatgagagtgtgtgtgtttaaggtcagagtatagggtgttcttcaacttggacagtagaaaataggcatcaagtgtgaaccggtgaggcgtggacagccttcttgtgactgagatgcttgtaagttctgtgccaggttctccaccactgtgtactttattgctatttaaaactgtatcaactctaacgaaagaataaattatttgtgattttaaaaaaaaaaaaaaaaaaaa

SEQ ID NO: 42 - protein, 344 aa, Mus musculus
MSVAFAAPRQRGKGEITPAAIQKMLDENNHLIQCIMDYQNKGKASECSQYQQILHTNLVYLATIADSNQNMQSLLPAPPTQTMPMGPGGMSQSGPPPPPRSHNMPSDGMVGGGPPAPHMQNQMNGQMPGPMMHQQPPSQQYNMPPGGAQHYQGQQAPMGLMGQVNQGSHMMGQRQMPPYRPPQQGPPQQYSGQEDYYGDQYSHGGQGPPEGMNQQYYPDGHNDYGYQQPSYPEQGYDRPYEDSSQHYYEGGNSQYGQQQDAYQGPPPQQGYPPQQQQYPGQQGYPGQQQSYGPSQGGPGPQYPNYPQGQGQQYGGYRPTQPGPPQPPQQRPYGYDQGQYGNYQQ

SEQ ID NO: 43 - DNA, 2888 bp, Mus musculus
ccttgctgggagctgcggctcagcgttaaggccaagccggccagcgagggacgcggcccgggagcatcctccccccaccgcgcgccctaaggtggaactgcccggaggcgggcgtcgggcccccagctccgcgggccctggagcgctcgggactcgctgatcgcgggctcggcggcaacatgtctgtggcgttcgcagccccgaggcagcggggcaagggcgaaatcacgcccgccgccatccagaagatgctggatgaaaacaaccatcttattcagtgtataatggactatcagaacaaagggaaggcctcggagtgctcgcagtatcagcagatattgcatacaaacctggtataccttgctacaatagcagactctaatcaaaatatgcagtctctcttaccagcaccgcccacacagactatgccaatgggtcctggagggatgagtcagagtggccctccaccccctccccgctctcacaacatgccttcagatggaatggtgggtgggggccctcctgcaccacacatgcagaaccagatgaacggccagatgcctgggccgatgatgcaccagcagcctccttctcagcagtacaatatgccacctggaggggcacagcattaccaaggacagcaggcgcccatggggctgatgggccaagttaaccaaggcagtcacatgatgggccagcgacagatgcctccctacagacctccgcaacagggcccaccacagcagtactcaggccaggaagactattatggggaccaatacagtcatggtggacaaggtcctccagaaggcatgaaccagcaatattaccctgatggtcataatgattacggttatcagcaaccgtcgtatcctgaacaaggctacgataggccttatgaggattcctcacaacattactacgaaggaggaaactcccagtatggccaacagcaagacgcttaccagggaccacctccacagcaaggatacccaccccagcagcagcagtacccgggacagcagggatacccagggcagcagcagagctatggtccttcgcagggcggtccaggtcctcagtatcctaattatcctcagggtcaaggtcagcagtatgggggctatagaccaacacagccaggaccaccccagccaccccagcagaggccttatgggtacgaccagggacagtatggaaattaccagcagtgaaaatgtccttacattccaatagccagtacctattagcaggcacgttgtcacagcactgcaccatggacacccccctgggaagactccttccattccagctaggtttttgggaaaacctttggctaagtggctgcttcgtcagcaagtagctgttatggtttagtttgtaaaggcttcgtagctaccgatgcacctgatttcacgtttctactctagatggcaacattggacagaaaatgcattgacgtgaggagtttgcagcggtttcagaactgtgctgcaaatggactgtcacagcctgaaaggtgtgagcagctgggtgtgtgttcgcggagcttcagggggtttcatacttttccaccgattattttgtaaggggaagggggaaatgtacactttttacagcagcaatattttgtctattatgtttatttcatgtgataaatatgcaaagcggtacactacacactgggcagaatcagaacccctgttaatgtggagtgtggtagatgctcggtgctgtggtgctctgaagacaggcgaggggaggcagaagcccaccacaggcccgctgttagttcttagaggaaactcctctctctcttatctaccagattagcaagggcgctgtgatacagttttttgagtacaaagacattttttaaaaagccttccagttttgtgcattaaaacctttttgtaaatatggtttataatactgttttcaaacgcaaggcaataattatgttgcatctgtgaactttggcaggtttgtgtaaaaggagggaagcctctcttaaaacagcaataacagaaaaggaggaagcgggatgtttttaccttgtcttgtaatcagggagctctcaccacgtcagagaggaggcagcattggtctcaccttactgttttttacattaccatgattggttcatggagcagggaggagtccacgagacttcacacgcttgtgctttaactttcttaactgggcacaagcaaagggcgccttcgtgttcctctcttcatcttagttaatgcgcgaggaaaatgctttgatggccatttctcattcgcactgaaagccgagaggtgacattttacggtttcttgtttttaagcacgacatacttaatcattatttgagactgattattttagctaaatttggggatatgccatggggcaagaaaacatgtactgagagatttctaaacacatctatttaagcatactttaaaaatatctagcccaaaggtaagttgctgtatcctcacagttgtctgcatccagggaatatgactgaatataacatatctttgtaattgaattagtttttgccacttctaactgaaaacagaacagaaggagtgccataaatgcaaagaagcaaagtgtactgttgtcaacatactgtaatcagaggaggggtttcaatgtgtctggatgagagtgtgtgtgtttaaggtcagagtatagggtgttcttcaacttggacagtagaaaataggcatcaagtgtgaaccggtgaggcgtggacagccttcttgtgactgagatgcttgtaagttctgtgccaggttctccaccactgtgtactttattgctatttaaaactgtatcaactctaacgaaagaataaattatttgtgattttaaaaaaaaaaaaaaaaaaaa

SEQ ID NO: 44 - protein, 313 aa, Mus musculus
MSVAFAAPRQRGKGEITPAAIQKMLDENNHLIQCIMDYQNKGKASECSQYQQILHTNLVYLATIADSNQNMQSLLPAPPTQTMPMGPGGMSQSGPPPPPRSHNMPSDGMVGGGPPAPHMQNQMNGQMPGPMMHQQPPSQQYNMPPGGAQHYQGQQAPMGLMGQVNQGSHMMGQRQMPPYRPPQQGPPQQYSGQEDYYGDQYSHGGQGPPEGMNQQYYPDGNSQYGQQQDAYQGPPPQQGYPPQQQQYPGQQGYPGQQQSYGPSQGGPGPQYPNYPQGQGQQYGGYRPTQPGPPQPPQQRPYGYDQGQYGNYQQ

SEQ ID NO: 45 - DNA, 2795 bp, Mus musculus
ccttgctgggagctgcggctcagcgttaaggccaagccggccagcgagggacgcggcccgggagcatcctccccccaccgcgcgccctaaggtggaactgcccggaggcgggcgtcgggcccccagctccgcgggccctggagcgctcgggactcgctgatcgcgggctcggcggcaacatgtctgtggcgttcgcagccccgaggcagcggggcaagggcgaaatcacgcccgccgccatccagaagatgctggatgaaaacaaccatcttattcagtgtataatggactatcagaacaaagggaaggcctcggagtgctcgcagtatcagcagatattgcatacaaacctggtataccttgctacaatagcagactctaatcaaaatatgcagtctctcttaccagcaccgcccacacagactatgccaatgggtcctggagggatgagtcagagtggccctccaccccctccccgctctcacaacatgccttcagatggaatggtgggtgggggccctcctgcaccacacatgcagaaccagatgaacggccagatgcctgggccgatgatgcaccagcagcctccttctcagcagtacaatatgccacctggaggggcacagcattaccaaggacagcaggcgcccatggggctgatgggccaagttaaccaaggcagtcacatgatgggccagcgacagatgcctccctacagacctccgcaacagggcccaccacagcagtactcaggccaggaagactattatggggaccaatacagtcatggtggacaaggtcctccagaaggcatgaaccagcaatattaccctgatggaaactcccagtatggccaacagcaagacgcttaccagggaccacctccacagcaaggatacccaccccagcagcagcagtacccgggacagcagggatacccagggcagcagcagagctatggtccttcgcagggcggtccaggtcctcagtatcctaattatcctcagggtcaaggtcagcagtatgggggctatagaccaacacagccaggaccaccccagccaccccagcagaggccttatgggtacgaccagggacagtatggaaattaccagcagtgaaaatgtccttacattccaatagccagtacctattagcaggcacgttgtcacagcactgcaccatggacacccccctgggaagactccttccattccagctaggtttttgggaaaacctttggctaagtggctgcttcgtcagcaagtagctgttatggtttagtttgtaaaggcttcgtagctaccgatgcacctgatttcacgtttctactctagatggcaacattggacagaaaatgcattgacgtgaggagtttgcagcggtttcagaactgtgctgcaaatggactgtcacagcctgaaaggtgtgagcagctgggtgtgtgttcgcggagcttcagggggtttcatacttttccaccgattattttgtaaggggaagggggaaatgtacactttttacagcagcaatattttgtctattatgtttatttcatgtgataaatatgcaaagcggtacactacacactgggcagaatcagaacccctgttaatgtggagtgtggtagatgctcggtgctgtggtgctctgaagacaggcgaggggaggcagaagcccaccacaggcccgctgttagttcttagaggaaactcctctctctcttatctaccagattagcaagggcgctgtgatacagttttttgagtacaaagacattttttaaaaagccttccagttttgtgcattaaaacctttttgtaaatatggtttataatactgttttcaaacgcaaggcaataattatgttgcatctgtgaactttggcaggtttgtgtaaaaggagggaagcctctcttaaaacagcaataacagaaaaggaggaagcgggatgtttttaccttgtcttgtaatcagggagctctcaccacgtcagagaggaggcagcattggtctcaccttactgttttttacattaccatgattggttcatggagcagggaggagtccacgagacttcacacgcttgtgctttaactttcttaactgggcacaagcaaagggcgccttcgtgttcctctcttcatcttagttaatgcgcgaggaaaatgctttgatggccatttctcattcgcactgaaagccgagaggtgacattttacggtttcttgtttttaagcacgacatacttaatcattatttgagactgattattttagctaaatttggggatatgccatggggcaagaaaacatgtactgagagatttctaaacacatctatttaagcatactttaaaaatatctagcccaaaggtaagttgctgtatcctcacagttgtctgcatccagggaatatgactgaatataacatatctttgtaattgaattagtttttgccacttctaactgaaaacagaacagaaggagtgccataaatgcaaagaagcaaagtgtactgttgtcaacatactgtaatcagaggaggggtttcaatgtgtctggatgagagtgtgtgtgtttaaggtcagagtatagggtgttcttcaacttggacagtagaaaataggcatcaagtgtgaaccggtgaggcgtggacagccttcttgtgactgagatgcttgtaagttctgtgccaggttctccaccactgtgtactttattgctatttaaaactgtatcaactctaacgaaagaataaattatttgtgattttaaaaaaaaaaaaaaaaaaaa

SEQ ID NO: 46 - DNA, 8585 bp, Homo sapiens
cagaaagcggagagtcacagcggggccaggccctggggagcggagcctccaccgcccccctcattcccaggcaagggcttggggggaatgagccgggagagccgggtcccgagcctacagagccgggagcagctgagccgccggcgcctcggccgccgccgccgcctcctcctcctccgccgccgccagcccggagcctgagccggcggggcgggggggagaggagcgagcgcagcgcagcagcggagccccgcgaggcccgcccgggcgggtggggagggcagcccgggggactgggccccggggcggggtgggagggggggagaagacgaagacagggccgggtctctccgcggacgagacagcggggatcatggccgcgcaggtcgcccccgccgccgccagcagcctgggcaacccgccgccgccgccgccctcggagctgaagaaagccgagcagcagcagcgggaggaggcggggggcgaggcggcggcggcggcagcggccgagcgcggggaaatgaaggcagccgccgggcaggaaagcgagggccccgccgtggggccgccgcagccgctgggaaaggagctgcaggacggggccgagagcaatgggggtggcggcggcggcggagccggcagcggcggcgggcccggcgcggagccggacctgaagaactcgaacgggaacgcgggccctaggcccgccctgaacaataacctcacggagccgcccggcggcggcggtggcggcagcagcgatggggtgggggcgcctcctcactcagccgcggccgccttgccgcccccagcctacggcttcgggcaaccctacggccggagcccgtctgccgtcgccgccgccgcggccgccgtcttccaccaacaacatggcggacaacaaagccctggcctggcagcgctgcagagcggcggcggcgggggcctggagccctacgcggggccccagcagaactctcacgaccacggcttccccaaccaccagtacaactcctactaccccaaccgcagcgcctaccccccgcccgccccggcctacgcgctgagctccccgagaggtggcactccgggctccggcgcggcggcggctgccggctccaagccgcctccctcctccagcgcctccgcctcctcgtcgtcttcgtccttcgctcagcagcgcttcggggccatggggggaggcggcccctccgcggccggcgggggaactccccagcccaccgccacccccaccctcaaccaactgctcacgtcgcccagctcggcccggggctaccagggctaccccgggggcgactacagtggcgggccccaggacgggggcgccggcaagggcccggcggacatggcctcgcagtgttggggggctgcggcggcggcagctgcggcggcggccgcctcgggaggggcccaacaaaggagccaccacgcgcccatgagccccgggagcagcggcggcggggggcagccgctcgcccggacccctcagccatccagtccaatggatcagatgggcaagatgagacctcagccatatggcgggactaacccatactcgcagcaacagggacctccgtcaggaccgcagcaaggacatgggtacccagggcagccatacgggtcccagaccccgcagcggtacccgatgaccatgcagggccgggcgcagagtgccatgggcggcctctcttatacacagcagattcctccttatggacaacaaggccccagcgggtatggtcaacagggccagactccatattacaaccagcaaagtcctcaccctcagcagcagcagccaccctactcccagcaaccaccgtcccagacccctcatgcccaaccttcgtatcagcagcagccacagtctcaaccaccacagctccagtcctctcagcctccatactcccagcagccatcccagcctccacatcagcagtccccggctccatacccctcccagcagtcgacgacacagcagcacccccagagccagcccccctactcacagccacaggctcagtctccttaccagcagcagcaacctcagcagccagcaccctcgacgctctcccagcaggctgcgtatcctcagccccagtctcagcagtcccagcaaactgcctattcccagcagcgcttccctccaccgcaggagctatctcaagattcatttgggtctcaggcatcctcagccccctcaatgacctccagtaagggagggcaagaagatatgaacctgagccttcagtcaagaccctccagcttgcctgatctatctggttcaatagatgacctccccatggggacagaaggagctctgagtcctggagtgagcacatcagggatttccagcagccaaggagagcagagtaatccagctcagtctcctttctctcctcatacctcccctcacctgcctggcatccgaggcccttccccgtcccctgttggctctcccgccagtgttgctcagtctcgctcaggaccactctcgcctgctgcagtgccaggcaaccagatgccacctcggccacccagtggccagtcggacagcatcatgcatccttccatgaaccaatcaagcattgcccaagatcgaggttatatgcagaggaacccccagatgccccagtacagttccccccagcccggctcagccttatctccgcgtcagccttccggaggacagatacacacaggcatgggctcctaccagcagaactccatggggagctatggtccccaggggggtcagtatggcccacaaggtggctaccccaggcagccaaactataatgccttgcccaatgccaactaccccagtgcaggcatggctggaggcataaaccccatgggtgccggaggtcaaatgcatggacagcctggcatcccaccttatggcacactccctccagggaggatgagtcacgcctccatgggcaaccggccttatggccctaacatggccaatatgccacctcaggttgggtcagggatgtgtcccccaccagggggcatgaaccggaaaacccaagaaactgctgtcgccatgcatgttgctgccaactctatccaaaacaggccgccaggctaccccaatatgaatcaagggggcatgatgggaactggacctccttatggacaagggattaatagtatggctggcatgatcaaccctcagggacccccatattccatgggtggaaccatggccaacaattctgcagggatggcagccagcccagagatgatgggccttggggatgtaaagttaactccagccaccaaaatgaacaacaaggcagatgggacacccaagacagaatccaaatccaagaaatccagttcttctactacaaccaatgagaagatcaccaagttgtatgagctgggtggtgagcctgagaggaagatgtgggtggaccgttatctggccttcactgaggagaaggccatgggcatgacaaatctgcctgctgtgggtaggaaacctctggacctctatcgcctctatgtgtctgtgaaggagattggtggattgactcaggtcaacaagaacaaaaaatggcgggaacttgcaaccaacctcaatgtgggcacatcaagcagtgctgccagctccttgaaaaagcagtatatccagtgtctctatgcctttgaatgcaagattgaacggggagaagaccctcccccagacatctttgcagctgctgattccaagaagtcccagcccaagatccagcctccctctcctgcgggatcaggatctatgcaggggccccagactccccagtcaaccagcagttccatggcagaaggaggagacttaaagccaccaactccagcatccacaccacacagtcagatccccccattgccaggcatgagcaggagcaattcagttgggatccaggatgcctttaatgatggaagtgactccacattccagaagcggaattccatgactccaaaccctgggtatcagcccagtatgaatacctctgacatgatggggcgcatgtcctatgagccaaataaggatccttatggcagcatgaggaaagctccagggagtgatcccttcatgtcctcagggcagggccccaacggcgggatgggtgacccctacagtcgtgctgccggccctgggctaggaaatgtggcgatgggaccacgacagcactatccctatggaggtccttatgacagagtgaggacggagcctggaatagggcctgagggaaacatgagcactggggccccacagccgaatctcatgccttccaacccagactcggggatgtattctcctagccgctaccccccgcagcagcagcagcagcagcagcaacgacatgattcctatggcaatcagttctccacccaaggcaccccttctggcagccccttccccagccagcagactacaatgtatcaacagcaacagcagaattacaagcggccaatggatggcacatatggccctcctgccaagcggcacgaaggggagatgtacagcgtgccatacagcactgggcaggggcagcctcagcagcagcagttgcccccagcccagccccagcctgccagccagcaacaagctgcccagccttcccctcagcaagatgtatacaaccagtatggcaatgcctatcctgccactgccacagctgctactgagcgccgaccagcaggcggcccccagaaccaatttccattccagtttggccgagaccgtgtctctgcaccccctggcaccaatgcccagcaaaacatgccaccacaaatgatgggcggccccatacaggcatcagctgaggttgctcagcaaggcaccatgtggcaggggcgtaatgacatgacctataattatgccaacaggcagagcacgggctctgccccccagggccccgcctatcatggcgtgaaccgaacagatgaaatgctgcacacagatcagagggccaaccacgaaggctcgtggccttcccatggcacacgccagcccccatatggtccctctgcccctgtgccccccatgacaaggccccctccatctaactaccagcccccaccaagcatgcagaatcacattcctcaggtatccagccctgctcccctgccccggccaatggagaaccgcacctctcctagcaagtctccattcctgcactctgggatgaaaatgcagaaggcaggtcccccagtacctgcctcgcacatagcacctgcccctgtgcagccccccatgattcggcgggatatcaccttcccacctggctctgttgaagccacacagcctgtgttgaagcagaggaggcggctcacaatgaaagacattggaaccccggaggcatggcgggtaatgatgtccctcaagtctggtctcctggcagagagcacatgggcattagataccatcaacatcctgctgtatgatgacaacagcatcatgaccttcaacctcagtcagctcccagggttgctagagctccttgtagaatatttccgacgatgcctgattgagatctttggcattttaaaggagtatgaggtgggtgacccaggacagagaacgctactggatcctgggaggttcagcaaggtgtctagtccagctcccatggagggtggggaagaagaagaagaacttctaggtcctaaactagaagaggaagaagaagaggaagtagttgaaaatgatgaggagatagccttttcaggcaaggacaagccagcttcagagaatagtgaggagaagctgatcagtaagtttgacaagcttccagtaaagatcgtacagaagaatgatccatttgtggtggactgctcagataagcttgggcgtgtgcaggagtttgacagtggcctgctgcactggcggattggtgggggggacaccactgagcatatccagacccacttcgagagcaagacagagctgctgccttcccggcctcacgcaccctgcccaccagcccctcggaagcatgtgacaacagcagagggtacaccagggacaacagaccaggaggggcccccacctgatggacctccagaaaaacggatcacagccactatggatgacatgttgtctactcggtctagcaccttgaccgaggatggagctaagagttcagaggccatcaaggagagcagcaagtttccatttggcattagcccagcacagagccaccggaacatcaagatcctagaggacgaaccccacagtaaggatgagaccccactgtgtacccttctggactggcaggattctcttgccaagcgctgcgtctgtgtgtccaataccattcgaagcctgtcatttgtgccaggcaatgactttgagatgtccaaacacccagggctgctgctcatcctgggcaagctgatcctgctgcaccacaagcacccagaacggaagcaggcaccactaacttatgaaaaggaggaggaacaggaccaaggggtgagctgcaacaaagtggagtggtggtgggactgcttggagatgctccgggaaaacaccttggttacactcgccaacatctcggggcagttggacctatctccataccccgagagcatttgcctgcctgtcctggacggactcctacactgggcagtttgcccttcagctgaagcccaggaccccttttccaccctgggccccaatgccgtcctttccccgcagagactggtcttggaaaccctcagcaaactcagcatccaggacaacaatgtggacctgattctggccacaccccccttcagccgcctggagaagttgtatagcactatggtgcgcttcctcagtgaccgaaagaacccggtgtgccgggagatggctgtggtactgctggccaacctggctcagggggacagcctggcagctcgtgccattgcagtgcagaagggcagtatcggcaacctcctgggcttcctagaggacagccttgccgccacacagttccagcagagccaggccagcctcctccacatgcagaacccaccctttgagccaactagtgtggacatgatgcggcgggctgcccgcgcgctgcttgccttggccaaggtggacgagaaccactcagagtttactctgtacgaatcacggctgttggacatctcggtatcaccgttgatgaactcattggtttcacaagtcatttgtgatgtactgtttttgattggccagtcatgacagccgtgggacacctcccccccccgtgtgtgtgtgcgtgtgtggagaacttagaaactgactgttgccctttatttatgcaaaaccacctcagaatccagtttaccctgtgctgtccagcttctcccttgggaaaaagtctctcctgtttctctctcctccttccacctcccctccctccatcacctcacgcctttctgttccttgtcctcaccttactcccctcaggaccctaccccaccctctttgaaaagacaaagctctgcctacatagaagactttttttattttaaccaaagttactgttgtttacagtgagtttggggaaaaaaaataaaataaaaatggctttcccagtccttgcatcaacgggatgccacatttcataactgtttttaatggtaaaaaaaaaaaaaaaaaatacaaaaaaaaattctgaaggacaaaaaaggtgactgctgaactgtgtgtggtttattgttgtacattcacaatcttgcaggagccaagaagttcgcagttgtgaacagaccctgttcactggagaggcctgtgcagtagagtgtagaccctttcatgtactgtactgtacacctgatactgtaaacatactgtaataataatgtctcacatggaaacagaaaacgctgggtcagcagcaagctgtagtttttaaaaatgtttttagttaaacgttgaggagaaaaaaaaaaaaggcttttcccccaaagtatcatgtgtgaacctacaacaccctgacctctttctctcctccttgattgtatgaataaccctgagatcacctcttagaactggttttaacctttagctgcagcggctacgctgccacgtgtgtatatatatgacgttgtacattgcacatacccttggatccccacagtttggtcctcctcccagctacccctttatagtatgacgagttaacaagttggtgacctgcacaaagcgagacacagctatttaatctcttgccagatatcgcccctcttggtgcgatgctgtacaggtctctgtaaaaagtccttgctgtctcagcagccaatcaacttatagtttatttttttctgggtttttgttttgttttgttttctttctaatcgaggtgtgaaaaagttctaggttcagttgaagttctgatgaagaaacacaattgagattttttcagtgataaaatctgcatatttgtatttcaacaatgtagctaaaacttgatgtaaattcctcctttttttccttttttggcttaatgaatatcatttattcagtatgaaatctttatactatatgttccacgtgttaagaataaatgtacattaaatcttggtaagacttt

SEQ ID NO: 47 - protein, 2285 aa, Homo sapiens
MAAQVAPAAASSLGNPPPPPPSELKKAEQQQREEAGGEAAAAAAAERGEMKAAAGQESEGPAVGPPQPLGKELQDGAESNGGGGGGGAGSGGGPGAEPDLKNSNGNAGPRPALNNNLTEPPGGGGGGSSDGVGAPPHSAAAALPPPAYGFGQPYGRSPSAVAAAAAAVFHQQHGGQQSPGLAALQSGGGGGLEPYAGPQQNSHDHGFPNHQYNSYYPNRSAYPPPAPAYALSSPRGGTPGSGAAAAAGSKPPPSSSASASSSSSSFAQQRFGAMGGGGPSAAGGGTPQPTATPTLNQLLTSPSSARGYQGYPGGDYSGGPQDGGAGKGPADMASQCWGAAAAAAAAAAASGGAQQRSHHAPMSPGSSGGGGQPLARTPQPSSPMDQMGKMRPQPYGGTNPYSQQQGPPSGPQQGHGYPGQPYGSQTPQRYPMTMQGRAQSAMGGLSYTQQIPPYGQQGPSGYGQQGQTPYYNQQSPHPQQQQPPYSQQPPSQTPHAQPSYQQQPQSQPPQLQSSQPPYSQQPSQPPHQQSPAPYPSQQSTTQQHPQSQPPYSQPQAQSPYQQQQPQQPAPSTLSQQAAYPQPQSQQSQQTAYSQQRFPPPQELSQDSFGSQASSAPSMTSSKGGQEDMNLSLQSRPSSLPDLSGSIDDLPMGTEGALSPGVSTSGISSSQGEQSNPAQSPFSPHTSPHLPGIRGPSPSPVGSPASVAQSRSGPLSPAAVPGNQMPPRPPSGQSDSIMHPSMNQSSIAQDRGYMQRNPQMPQYSSPQPGSALSPRQPSGGQIHTGMGSYQQNSMGSYGPQGGQYGPQGGYPRQPNYNALPNANYPSAGMAGGINPMGAGGQMHGQPGIPPYGTLPPGRMSHASMGNRPYGPNMANMPPQVGSGMCPPPGGMNRKTQETAVAMHVAANSIQNRPPGYPNMNQGGMMGTGPPYGQGINSMAGMINPQGPPYSMGGTMANNSAGMAASPEMMGLGDVKLTPATKMNNKADGTPKTESKSKKSSSSTTTNEKITKLYELGGEPERKMWVDRYLAFTEEKAMGMTNLPAVGRKPLDLYRLYVSVKEIGGLTQVNKNKKWRELATNLNVGTSSSAASSLKKQYIQCLYAFECKIERGEDPPPDIFAAADSKKSQPKIQPPSPAGSGSMQGPQTPQSTSSSMAEGGDLKPPTPASTPHSQIPPLPGMSRSNSVGIQDAFNDGSDSTFQKRNSMTPNPGYQPSMNTSDMMGRMSYEPNKDPYGSMRKAPGSDPFMSSGQGPNGGMGDPYSRAAGPGLGNVAMGPRQHYPYGGPYDRVRTEPGIGPEGNMSTGAPQPNLMPSNPDSGMYSPSRYPPQQQQQQQQRHDSYGNQFSTQGTPSGSPFPSQQTTMYQQQQQNYKRPMDGTYGPPAKRHEGEMYSVPYSTGQGQPQQQQLPPAQPQPASQQQAAQPSPQQDVYNQYGNAYPATATAATERRPAGGPQNQFPFQFGRDRVSAPPGTNAQQNMPPQMMGGPIQASAEVAQQGTMWQGRNDMTYNYANRQSTGSAPQGPAYHGVNRTDEMLHTDQRANHEGSWPSHGTRQPPYGPSAPVPPMTRPPPSNYQPPPSMQNHIPQVSSPAPLPRPMENRTSPSKSPFLHSGMKMQKAGPPVPASHIAPAPVQPPMIRRDITFPPGSVEATQPVLKQRRRLTMKDIGTPEAWRVMMSLKSGLLAESTWALDTINILLYDDNSIMTFNLSQLPGLLELLVEYFRRCLIEIFGILKEYEVGDPGQRTLLDPGRFSKVSSPAPMEGGEEEEELLGPKLEEEEEEEVVENDEEIAFSGKDKPASENSEEKLISKFDKLPVKIVQKNDPFVVDCSDKLGRVQEFDSGLLHWRIGGGDTTEHIQTHFESKTELLPSRPHAPCPPAPRKHVTTAEGTPGTTDQEGPPPDGPPEKRITATMDDMLSTRSSTLTEDGAKSSEAIKESSKFPFGISPAQSHRNIKILEDEPHSKDETPLCTLLDWQDSLAKRCVCVSNTIRSLSFVPGNDFEMSKHPGLLLILGKLILLHHKHPERKQAPLTYEKEEEQDQGVSCNKVEWWWDCLEMLRENTLVTLANISGQLDLSPYPESICLPVLDGLLHWAVCPSAEAQDPFSTLGPNAVLSPQRLVLETLSKLSIQDNNVDLILATPPFSRLEKLYSTMVRFLSDRKNPVCREMAVVLLANLAQGDSLAARAIAVQKGSIGNLLGFLEDSLAATQFQQSQASLLHMQNPPFEPTSVDMMRRAARALLALAKVDENHSEFTLYESRLLDISVSPLMNSLVSQVICDVLFLIGQS

SEQ ID NO: 48 - DNA, 7874 bp, Homo sapiens
cagaaagcggagagtcacagcggggccaggccctggggagcggagcctccaccgcccccctcattcccaggcaagggcttggggggaatgagccgggagagccgggtcccgagcctacagagccgggagcagctgagccgccggcgcctcggccgccgccgccgcctcctcctcctccgccgccgccagcccggagcctgagccggcggggcgggggggagaggagcgagcgcagcgcagcagcggagccccgcgaggcccgcccgggcgggtggggagggcagcccgggggactgggccccggggcggggtgggagggggggagaagacgaagacagggccgggtctctccgcggacgagacagcggggatcatggccgcgcaggtcgcccccgccgccgccagcagcctgggcaacccgggcgaggcggcggcggcggcagcggccgagcgcggggaaatgaaggcagccgccgggcaggaaagcgagggccccgccgtggggccgccgcagccgctgggaaaggagctgcaggacggggccgagagcaatgggggtggcggcggcggcggagccggcagcggcggcgggcccggcgcggagccggacctgaagaactcgaacgggaacgcgggccctaggcccgccctgaacaataacctcacggagccgcccggcggcggcggtggcggcagcagcgatggggtgggggcgcctcctcactcagccgcggccgccttgccgcccccagcctacggcttcgggcaaccctacggccggagcccgtctgccgtcgccgccgccgcggccgccgtcttccaccaacaacatggcggacaacaaagccctggcctggcagcgctgcagagcggcggcggcgggggcctggagccctacgcggggccccagcagaactctcacgaccacggcttccccaaccaccagtacaactcctactaccccaaccgcagcgcctaccccccgcccgccccggcctacgcgctgagctccccgagaggtggcactccgggctccggcgcggcggcggctgccggctccaagccgcctccctcctccagcgcctccgcctcctcgtcgtcttcgtccttcgctcagcagcgcttcggggccatggggggaggcggcccctccgcggccggcgggggaactccccagcccaccgccacccccaccctcaaccaactgctcacgtcgcccagctcggcccggggctaccagggctaccccgggggcgactacagtggcgggccccaggacgggggcgccggcaagggcccggcggacatggcctcgcagtgttggggggctgcggcggcggcagctgcggcggcggccgcctcgggaggggcccaacaaaggagccaccacgcgcccatgagccccgggagcagcggcggcggggggcagccgctcgcccggacccctcagccatccagtccaatggatcagatgggcaagatgagacctcagccatatggcgggactaacccatactcgcagcaacagggacctccgtcaggaccgcagcaaggacatgggtacccagggcagccatacgggtcccagaccccgcagcggtacccgatgaccatgcagggccgggcgcagagtgccatgggcggcctctcttatacacagcagattcctccttatggacaacaaggccccagcgggtatggtcaacagggccagactccatattacaaccagcaaagtcctcaccctcagcagcagcagccaccctactcccagcaaccaccgtcccagacccctcatgcccaaccttcgtatcagcagcagccacagtctcaaccaccacagctccagtcctctcagcctccatactcccagcagccatcccagcctccacatcagcagtccccggctccatacccctcccagcagtcgacgacacagcagcacccccagagccagcccccctactcacagccacaggctcagtctccttaccagcagcagcaacctcagcagccagcaccctcgacgctctcccagcaggctgcgtatcctcagccccagtctcagcagtcccagcaaactgcctattcccagcagcgcttccctccaccgcaggagctatctcaagattcatttgggtctcaggcatcctcagccccctcaatgacctccagtaagggagggcaagaagatatgaacctgagccttcagtcaagaccctccagcttgcctgatctatctggttcaatagatgacctccccatggggacagaaggagctctgagtcctggagtgagcacatcagggatttccagcagccaaggagagcagagtaatccagctcagtctcctttctctcctcatacctcccctcacctgcctggcatccgaggcccttccccgtcccctgttggctctcccgccagtgttgctcagtctcgctcaggaccactctcgcctgctgcagtgccaggcaaccagatgccacctcggccacccagtggccagtcggacagcatcatgcatccttccatgaaccaatcaagcattgcccaagatcgaggttatatgcagaggaacccccagatgccccagtacagttccccccagcccggctcagccttatctccgcgtcagccttccggaggacagatacacacaggcatgggctcctaccagcagaactccatggggagctatggtccccaggggggtcagtatggcccacaaggtggctaccccaggcagccaaactataatgccttgcccaatgccaactaccccagtgcaggcatggctggaggcataaaccccatgggtgccggaggtcaaatgcatggacagcctggcatcccaccttatggcacactccctccagggaggatgagtcacgcctccatgggcaaccggccttatggccctaacatggccaatatgccacctcaggttgggtcagggatgtgtcccccaccagggggcatgaaccggaaaacccaagaaactgctgtcgccatgcatgttgctgccaactctatccaaaacaggccgccaggctaccccaatatgaatcaagggggcatgatgggaactggacctccttatggacaagggattaatagtatggctggcatgatcaaccctcagggacccccatattccatgggtggaaccatggccaacaattctgcagggatggcagccagcccagagatgatgggccttggggatgtaaagttaactccagccaccaaaatgaacaacaaggcagatgggacacccaagacagaatccaaatccaagaaatccagttcttctactacaaccaatgagaagatcaccaagttgtatgagctgggtggtgagcctgagaggaagatgtgggtggaccgttatctggccttcactgaggagaaggccatgggcatgacaaatctgcctgctgtgggtaggaaacctctggacctctatcgcctctatgtgtctgtgaaggagattggtggattgactcaggtcaacaagaacaaaaaatggcgggaacttgcaaccaacctcaatgtgggcacatcaagcagtgctgccagctccttgaaaaagcagtatatccagtgtctctatgcctttgaatgcaagattgaacggggagaagaccctcccccagacatctttgcagctgctgattccaagaagtcccagcccaagatccagcctccctctcctgcgggatcaggatctatgcaggggccccagactccccagtcaaccagcagttccatggcagaaggaggagacttaaagccaccaactccagcatccacaccacacagtcagatccccccattgccaggcatgagcaggagcaattcagttgggatccaggatgcctttaatgatggaagtgactccacattccagaagcggaattccatgactccaaaccctgggtatcagcccagtatgaatacctctgacatgatggggcgcatgtcctatgagccaaataaggatccttatggcagcatgaggaaagctccagggagtgatcccttcatgtcctcagggcagggccccaacggcgggatgggtgacccctacagtcgtgctgccggccctgggctaggaaatgtggcgatgggaccacgacagcactatccctatggaggtccttatgacagagtgaggacggagcctggaatagggcctgagggaaacatgagcactggggccccacagccgaatctcatgccttccaacccagactcggggatgtattctcctagccgctaccccccgcagcagcagcagcagcagcagcaacgacatgattcctatggcaatcagttctccacccaaggcaccccttctggcagccccttccccagccagcagactacaatgtatcaacagcaacagcaggtatccagccctgctcccctgccccggccaatggagaaccgcacctctcctagcaagtctccattcctgcactctgggatgaaaatgcagaaggcaggtcccccagtacctgcctcgcacatagcacctgcccctgtgcagccccccatgattcggcgggatatcaccttcccacctggctctgttgaagccacacagcctgtgttgaagcagaggaggcggctcacaatgaaagacattggaaccccggaggcatggcgggtaatgatgtccctcaagtctggtctcctggcagagagcacatgggcattagataccatcaacatcctgctgtatgatgacaacagcatcatgaccttcaacctcagtcagctcccagggttgctagagctccttgtagaatatttccgacgatgcctgattgagatctttggcattttaaaggagtatgaggtgggtgacccaggacagagaacgctactggatcctgggaggttcagcaaggtgtctagtccagctcccatggagggtggggaagaagaagaagaacttctaggtcctaaactagaagaggaagaagaagaggaagtagttgaaaatgatgaggagatagccttttcaggcaaggacaagccagcttcagagaatagtgaggagaagctgatcagtaagtttgacaagcttccagtaaagatcgtacagaagaatgatccatttgtggtggactgctcagataagcttgggcgtgtgcaggagtttgacagtggcctgctgcactggcggattggtgggggggacaccactgagcatatccagacccacttcgagagcaagacagagctgctgccttcccggcctcacgcaccctgcccaccagcccctcggaagcatgtgacaacagcagagggtacaccagggacaacagaccaggaggggcccccacctgatggacctccagaaaaacggatcacagccactatggatgacatgttgtctactcggtctagcaccttgaccgaggatggagctaagagttcagaggccatcaaggagagcagcaagtttccatttggcattagcccagcacagagccaccggaacatcaagatcctagaggacgaaccccacagtaaggatgagaccccactgtgtacccttctggactggcaggattctcttgccaagcgctgcgtctgtgtgtccaataccattcgaagcctgtcatttgtgccaggcaatgactttgagatgtccaaacacccagggctgctgctcatcctgggcaagctgatcctgctgcaccacaagcacccagaacggaagcaggcaccactaacttatgaaaaggaggaggaacaggaccaaggggtgagctgcaacaaagtggagtggtggtgggactgcttggagatgctccgggaaaacaccttggttacactcgccaacatctcggggcagttggacctatctccataccccgagagcatttgcctgcctgtcctggacggactcctacactgggcagtttgcccttcagctgaagcccaggaccccttttccaccctgggccccaatgccgtcctttccccgcagagactggtcttggaaaccctcagcaaactcagcatccaggacaacaatgtggacctgattctggccacaccccccttcagccgcctggagaagttgtatagcactatggtgcgcttcctcagtgaccgaaagaacccggtgtgccgggagatggctgtggtactgctggccaacctggctcagggggacagcctggcagctcgtgccattgcagtgcagaagggcagtatcggcaacctcctgggcttcctagaggacagccttgccgccacacagttccagcagagccaggccagcctcctccacatgcagaacccaccctttgagccaactagtgtggacatgatgcggcgggctgcccgcgcgctgcttgccttggccaaggtggacgagaaccactcagagtttactctgtacgaatcacggctgttggacatctcggtatcaccgttgatgaactcattggtttcacaagtcatttgtgatgtactgtttttgattggccagtcatgacagccgtgggacacctcccccccccgtgtgtgtgtgcgtgtgtggagaacttagaaactgactgttgccctttatttatgcaaaaccacctcagaatccagtttaccctgtgctgtccagcttctcccttgggaaaaagtctctcctgtttctctctcctccttccacctcccctccctccatcacctcacgcctttctgttccttgtcctcaccttactcccctcaggaccctaccccaccctctttgaaaagacaaagctctgcctacatagaagactttttttattttaaccaaagttactgttgtttacagtgagtttggggaaaaaaaataaaataaaaatggctttcccagtccttgcatcaacgggatgccacatttcataactgtttttaatggtaaaaaaaaaaaaaaaaaatacaaaaaaaaattctgaaggacaaaaaaggtgactgctgaactgtgtgtggtttattgttgtacattcacaatcttgcaggagccaagaagttcgcagttgtgaacagaccctgttcactggagaggcctgtgcagtagagtgtagaccctttcatgtactgtactgtacacctgatactgtaaacatactgtaataataatgtctcacatggaaacagaaaacgctgggtcagcagcaagctgtagtttttaaaaatgtttttagttaaacgttgaggagaaaaaaaaaaaaggcttttcccccaaagtatcatgtgtgaacctacaacaccctgacctctttctctcctccttgattgtatgaataaccctgagatcacctcttagaactggttttaacctttagctgcagcggctacgctgccacgtgtgtatatatatgacgttgtacattgcacatacccttggatccccacagtttggtcctcctcccagctacccctttatagtatgacgagttaacaagttggtgacctgcacaaagcgagacacagctatttaatctcttgccagatatcgcccctcttggtgcgatgctgtacaggtctctgtaaaaagtccttgctgtctcagcagccaatcaacttatagtttatttttttctgggtttttgttttgttttgttttctttctaatcgaggtgtgaaaaagttctaggttcagttgaagttctgatgaagaaacacaattgagattttttcagtgataaaatctgcatatttgtatttcaacaatgtagctaaaacttgatgtaaattcctcctttttttccttttttggcttaatgaatatcatttattcagtatgaaatctttatactatatgttccacgtgttaagaataaatgtacattaaatcttggtaagacttt

SEQ ID NO: 49 - protein, 2068 aa, Homo sapiens
MAAQVAPAAASSLGNPPPPPPSELKKAEQQQREEAGGEAAAAAAAERGEMKAAAGQESEGPAVGPPQPLGKELQDGAESNGGGGGGGAGSGGGPGAEPDLKNSNGNAGPRPALNNNLTEPPGGGGGGSSDGVGAPPHSAAAALPPPAYGFGQPYGRSPSAVAAAAAAVFHQQHGGQQSPGLAALQSGGGGGLEPYAGPQQNSHDHGFPNHQYNSYYPNRSAYPPPAPAYALSSPRGGTPGSGAAAAAGSKPPPSSSASASSSSSSFAQQRFGAMGGGGPSAAGGGTPQPTATPTLNQLLTSPSSARGYQGYPGGDYSGGPQDGGAGKGPADMASQCWGAAAAAAAAAAASGGAQQRSHHAPMSPGSSGGGGQPLARTPQPSSPMDQMGKMRPQPYGGTNPYSQQQGPPSGPQQGHGYPGQPYGSQTPQRYPMTMQGRAQSAMGGLSYTQQIPPYGQQGPSGYGQQGQTPYYNQQSPHPQQQQPPYSQQPPSQTPHAQPSYQQQPQSQPPQLQSSQPPYSQQPSQPPHQQSPAPYPSQQSTTQQHPQSQPPYSQPQAQSPYQQQQPQQPAPSTLSQQAAYPQPQSQQSQQTAYSQQRFPPPQELSQDSFGSQASSAPSMTSSKGGQEDMNLSLQSRPSSLPDLSGSIDDLPMGTEGALSPGVSTSGISSSQGEQSNPAQSPFSPHTSPHLPGIRGPSPSPVGSPASVAQSRSGPLSPAAVPGNQMPPRPPSGQSDSIMHPSMNQSSIAQDRGYMQRNPQMPQYSSPQPGSALSPRQPSGGQIHTGMGSYQQNSMGSYGPQGGQYGPQGGYPRQPNYNALPNANYPSAGMAGGINPMGAGGQMHGQPGIPPYGTLPPGRMSHASMGNRPYGPNMANMPPQVGSGMCPPPGGMNRKTQETAVAMHVAANSIQNRPPGYPNMNQGGMMGTGPPYGQGINSMAGMINPQGPPYSMGGTMANNSAGMAASPEMMGLGDVKLTPATKMNNKADGTPKTESKSKKSSSSTTTNEKITKLYELGGEPERKMWVDRYLAFTEEKAMGMTNLPAVGRKPLDLYRLYVSVKEIGGLTQVNKNKKWRELATNLNVGTSSSAASSLKKQYIQCLYAFECKIERGEDPPPDIFAAADSKKSQPKIQPPSPAGSGSMQGPQTPQSTSSSMAEGGDLKPPTPASTPHSQIPPLPGMSRSNSVGIQDAFNDGSDSTFQKRNSMTPNPGYQPSMNTSDMMGRMSYEPNKDPYGSMRKAPGSDPFMSSGQGPNGGMGDPYSRAAGPGLGNVAMGPRQHYPYGGPYDRVRTEPGIGPEGNMSTGAPQPNLMPSNPDSGMYSPSRYPPQQQQQQQQRHDSYGNQFSTQGTPSGSPFPSQQTTMYQQQQQVSSPAPLPRPMENRTSPSKSPFLHSGMKMQKAGPPVPASHIAPAPVQPPMIRRDITFPPGSVEATQPVLKQRRRLTMKDIGTPEAWRVMMSLKSGLLAESTWALDTINILLYDDNSIMTFNLSQLPGLLELLVEYFRRCLIEIFGILKEYEVGDPGQRTLLDPGRFSKVSSPAPMEGGEEEEELLGPKLEEEEEEEVVENDEEIAFSGKDKPASENSEEKLISKFDKLPVKIVQKNDPFVVDCSDKLGRVQEFDSGLLHWRIGGGDTTEHIQTHFESKTELLPSRPHAPCPPAPRKHVTTAEGTPGTTDQEGPPPDGPPEKRITATMDDMLSTRSSTLTEDGAKSSEAIKESSKFPFGISPAQSHRNIKILEDEPHSKDETPLCTLLDWQDSLAKRCVCVSNTIRSLSFVPGNDFEMSKHPGLLLILGKLILLHHKHPERKQAPLTYEKEEEQDQGVSCNKVEWWWDCLEMLRENTLVTLANISGQLDLSPYPESICLPVLDGLLHWAVCPSAEAQDPFSTLGPNAVLSPQRLVLETLSKLSIQDNNVDLILATPPFSRLEKLYSTMVRFLSDRKNPVCREMAVVLLANLAQGDSLAARAIAVQKGSIGNLLGFLEDSLAATQFQQSQASLLHMQNPPFEPTSVDMMRRAARALLALAKVDENHSEFTLYESRLLDISVSPLMNSLVSQVICDVLFLIGQS

SEQ ID NO: 50 - DNA, 8175 bp, Mus musculus
atggccgcgcaggtcgcccccgccgccgccagcagcctgggcaacccgccgccgccgccctcggagctgaagaaagccgagcagcaacagcgggaggaggcggggggcgaggcggcggcggcagcggccgagcgcggggaaatgaaggcagccgccgggcaggagagcgagggccccgccgtggggccgccgcagccgctgggaaaggagctgcaggacggggccgagagcaatgggggtggcggcggcggcggagccggcagcggcggcgggcccggcgcggagccggacctgaagaactcgaacgggaacgcgggccctaggcccgccctgaacaataacctcccggagccgcccggcggcggcggcggcggcggcagcagcagcagcgacggggtgggggcgcctcctcactcggccgcggccgccctgccgcccccagcctacggcttcgggcaagcctacggccggagcccgtctgccgtcgccgccgcggcggccgccgtcttccaccaacaacatggcggacaacaaagccctggcctggcagcgctgcagagcggcggcggcgggggcttggagccctacgccgggccccagcagaactcgcacgaccacggcttccccaaccaccagtacaactcctactaccccaaccgcagcgcctaccccccgcctccccaggcctacgcgctgagctccccgagaggtggcactccgggctccggcgcggcggcggccgccggctccaagccgcctccctcctccagcgcctctgcctcctcgtcgtcttcgtccttcgcacagcagcgcttcggggccatggggggaggcggcccctcagcggccggcgggggaactccccagcccaccgccacccccaccctcaaccaactgctcacgtcgcccagctcggcccgtggctaccagggctaccccgggggcgactacggcggcgggccccaggacgggggcgcgggcaaaggcccggcggacatggcctcgcagtgctggggggctgcggcggcggcggcggcggcggcagcggccgtctcgggaggggcccaacaaaggagccaccacgcgcccatgagccccgggagcagcggcggcggggggcagccgctcgcccggacccctcagtcatccagtccaatggatcagatgggaaagatgagacctcagccgtatggtgggactaacccatactcgcaacaacagggacctccttcaggaccgcaacaaggacatgggtacccagggcagccatatgggtcccagactccacagcggtaccccatgaccatgcagggccgggctcagagtgccatgggcagcctctcttatgcacagcagattccaccttatggccagcaaggccccagtgcgtatggccagcagggccagactccatactataaccagcaaagtcctcatccccagcagcagccaccttacgcccagcaaccaccatcccagacccctcatgcccagccttcgtatcagcagcagccgcagactcagcaaccacagcttcagtcctctcagcctccatattcccagcagccatcccagcctccacatcagcagtccccaactccatatccctcccagcagtccaccacacaacagcatccccagagccagcccccctactcacaaccacaggcacagtctccctaccagcagcagcaacctcagcagccagcatcctcgtcgctctcccagcaggctgcatatcctcagccccagcctcagcagtcccagcaaactgcctattcccagcagcgcttccctccaccacaggagctttctcaagattcatttgggtctcaggcatcctcagccccctcaatgacctccagtaagggagggcaagaagatatgaacctgagtcttcagtcaaggccctccagcttgcctgatctgtctggttcaatcgatgatctccccatggggacagaaggagctctgagtcctggcgtgagcacatcagggatttccagcagccaaggagagcagagcaatccagctcagtctcccttttctcctcacacctcccctcacctgcctggcatccgaggcccgtccccgtcccctgttggctctcctgccagtgtcgcgcagtctcgctcaggaccactctcgcctgctgcagtgccaggcaaccagatgccacctcggccacccagtggccagtcagacagcatcatgcacccttccatgaaccaatcaagcattgcccaagatcgaggttatatgcagaggaacccccagatgccccagtacacttcccctcagcctggctcggccttatccccacgtcagccgtctggaggacagatgcactcgggcgtgggctcctaccagcagaactccatggggagctacggcccccagggcagtcagtatggcccacaaggaggctatcctaggcagcctaactataatgccttgcccaacgccaactaccccaatgcaggcatggccggaagtatgaaccctatgggtgctggaggtcagatgcatgggcagcctggaatcccaccttacggcacactccctccagggagaatggctcatgcgtctatgggcaacaggccctatggccctaatatggccaatatgccacctcaggttgggtcagggatgtgtcctccaccagggggaatgaacaggaaaactcaagagtctgctgttgccatgcatgttgctgccaactctatccaaaacaggccaccaggctacccaaatatgaatcaagggggcatgatgggaactggacctccctatggacaggggatcaatagtatggctggcatgatcaaccctcagggacccccatatcctatgggtggaaccatggccaacaattcagcagggatggcagccagcccagagatgatgggccttggggatgttaagttaactcccgccacaaaaatgaacaacaaggcagatggaacacccaagacagaatccaaatctaagaaatccagttcttctaccaccaccaatgagaagatcaccaaattgtatgagttgggtggtgagcccgagaggaagatgtgggtggaccggtacctggccttcacagaggagaaggccatgggcatgacaaatctgcctgctgtggggaggaagcctctggacctctatcgcctctatgtgtctgtgaaggagattggtgggttgactcaggtcaacaagaacaaaaaatggcgggaacttgcaaccaacctcaatgtgggtacatcaagcagtgctgccagctcactgaaaaagcagtatatccaatgtctctatgcctttgagtgcaagatcgagcgtggagaagaccctccccccgatatcttcgcagctgctgactccaagaagtcccaacccaagatccagcccccctctcctgcgggatcagggtctatgcaggggccacaaactcctcagtcaaccagcagttctatggcagaaggaggagacctgaagccaccaactccagcatccacaccacatagtcaaattccccccttaccaggcatgagcaggagcaactcagtcggaatccaggatgcctttcctgatggaagtgaccccacattccagaagcggaattccatgactccaaaccctgggtaccagcccagtatgaatacctctgacatgatggggcgcatgtcctatgagccaaataaggatccttatggcagcatgaggaaagcgccaggaagtgatcccttcatgtcctcagggcagggccccaatggcgggatgggtgatccctacagccgtgctgctggccctgggctgggaagtgtggcgatgggaccacggcagcactatccctatggaggtccttacgacagagtgaggacggagcctggaatcgggcctgaaggaaatatgggcactggagcccctcagccaaatctcatgccttccaccccagattcggggatgtattctcctagccgctaccccccgcagcagcagcagcaacagcagcaacaacatgattcctatggcaatcaattctctacccaaggcaccccttccagcagccccttccccagccagcagaccacaatgtatcagcagcagcagcagaattataagaggccaatggatggcacatatggcccccctgccaagcggcatgaaggggagatgtacagtgtgccgtacagcgctgggcaaggccagcctcaacagcagcagttgcctgcagctcagtcccagcctgccagccagccacaagctgcccagccttcccctcagcaggacgtgtacaaccagtacagcaatgcctaccctgcctccgccaccgctgctactgatcgccgaccagcaggcggcccccagaaccaatttccattccagtttggccgagaccgagtctctgcacctcctggttccagtgcccagcagaacatgccaccacaaatgatgggtggccccatacaggcatcagctgaggttgctcagcagggcaccatgtggcaggggcgaaatgacatgacctacaattatgccaacaggcagaacacaggctctgccacccagggccctgcgtatcatggtgtgaaccgaacagatgaaatgctccacacagatcagagggccaaccatgaaggcccatggccttcccatggcacacgccagcctccgtatggtccttcagcccctgttccccccatgacaaggccccctccatctaactaccagcccccaccaagcatgccgaatcacattcctcaggtatccagccccgctcccctcccccggcccatggagaaccgtacttctcctagcaagtctccattcctgcactctgggatgaaaatgcaaaaggcgggtccaccggtgcctgcttcgcacatagcgcctacccctgtgcagccgcctatgattcggcgggatatcaccttcccacctggctctgtagaggccactcagcctgtgttgaagcagagaaggcggctcacaatgaaagacattggaaccccggaggcatggcgggtaatgatgtccctcaagtccgggctcctggcagagagcacgtgggcgttagacaccattaacattctactgtatgatgacaacagcattatgaccttcaacctcagccagctcccaggcttgctagagctccttgtggaatatttccgtagatgcctaattgaaatctttggcattttaaaggagtatgaggtaggggacccaggacagagaacattactagaccctgggagattcaccaaggtgtatagtccagcccatacagaggaagaagaggaagaacaccttgatcctaaactggaggaggaagaggaagaaggggttggaaatgatgaggagatggcctttttgggcaaggacaagccatcttcagagaataatgaggagaagctagtcagtaagtttgacaagcttccggtaaagatcgtgcagaggaatgacccatttgtggtggactgctcagataagcttgggcgcgtgcaggagtttgacagtggcctgctacactggcggattggtggtggggataccactgagcatatccagacccactttgagagcaagatagagctgctgccttcccggccttatgtgccctgcccaacgccccctcggaaacacctcacaacagtagagggcacaccagggacaacggagcaggagggccccccgcccgatggccttccagagaaaaggatcacagccaccatggatgacatgttgtctacccggtctagcacattgactgatgagggggcaaagagtgcagaggccaccaaggaaagcagcaagtttccatttggcattagcccagcacagagccaccggaacatcaaaattttagaggatgaaccccatagtaaggatgagaccccactgtgtacccttctggactggcaggattcccttgctaagcgctgtgtctgtgtctccaataccatccggagcctgtcgtttgtgccaggcaacgactttgagatgtccaaacacccagggctgctgcttatcctgggcaagctgatcctgctgcaccacaagcacccagagcggaagcaggcaccactaacttatgagaaggaggaggaacaggaccaaggggtgagctgtgacaaagtggagtggtggtgggactgcttggagatgctccgagaaaacacgctggtcaccctcgccaacatctcggggcaattggacctatccccatatcctgagagcatctgcctgcctgtcctggacggactcctacactgggcagtttgcccttcagctgaagcccaggaccccttctcaaccctaggccccaatgccgtcctctccccccagagattggtcttggaaaccctcagcaaactcagcatccaggacaacaatgtggacctgatcctggccactcccccttttagccgcctggagaagttgtatagtaccatggtgcgcttcctcagtgaccgaaagaacccagtgtgccgggagatggccgtggtactgctggcaaatctggcccagggggacagcctggcagcccgggccattgcagtgcagaagggcagcatcggcaacctcctgggtttcctggaggacagccttgctgccacacagttccagcagagccaggcaagcctcctgcatatgcagaatccaccctttgaaccaactagtgtggacatgatgcggcgggctgcccgagcactgcttgccctggccaaggtggatgagaaccactcagagttcactctgtatgagtcacggctgttggacatctccgtgtcaccactgatgaactcattggtttcacaagtcatttgtgatgtactgtttttgattggccagtcatgacagccgtgggacacctcccctccccgtgtgtgtgtgagtgtgtggagaacttagaaactgactgttgccctttatttatgcaaaaccacctcagaatccagtttaccctgtgctgtccagcttctcccttgggaaagcctctcctgttctctctcctccccaccctcactccctcacacctttctgttccccatcctcacctgcttccctcaggaccccaccctatttgaaaagacaaagctctgcctacatagaagacttttttattttaaccaaagttactgttgtttacagtgagtttggggaaaaaaatggctttcccagtccttgcatcaacgggatgccacatttcataactgtttttaatggttaaaaaaaaaaaaaaaaaaaggaaaaaaaatacaaaaaaaccctgaaggacaaaggtgactgctgagctgtgtggtttgtcgctgtccattcacaatctcgcaggagccgagaagttcgcagttgtgagcagaccctgttcactggagaggcctgtgcagtagagtgtagatcctttcatgtactgtactgtacacctgatactgtaaacatactgtaataataatgtctcacatggaaacgagagaagacgctgggtcagcagcaagctgtagtttttaaaaatgtttttagttaaatgttgaggagaaaaaaaatggctttccccccaaagtatcctgtgtgaacctacaacgccctgacctctttctctcctccttgattgtatgaatagccctgagatcacctcttagacctggttttaacctttagctgcagcggctgcgctgccacgtgtgtatatatatgatgttgtacattgcacatacccttgaatctccacagtttggtccccttcccagctacccctttatagtatggcgagttaacaagttggtgacctgcacaaagcgagacacagctatttaatctcttgccagacattgcccctcttggtgcagtgctctacaggtctctgtaaaaagcccttgctgtctcagcagccaatcaacttacagtttatttttttctgggtttttgttttgttttgtttcatttctaatcgaggtgtgaaaaagttctaggttcagttgaagttcctgatgaagaaacacaattgagattttttcagtgataaaatctgcatatttgtatttcaacaatgtagctaaaaacttgatgtaaattcctccttttttttccttttttggcttaatgaatatcatttattcagtatgaaatctttatactatatgttccacgtgttaagaataaatgtacattaaatcttggtaa

SEQ ID NO: 51 - protein, 2283 aa, Mus musculus
MAAQVAPAAASSLGNPPPPPSELKKAEQQQREEAGGEAAAAAAERGEMKAAAGQESEGPAVGPPQPLGKELQDGAESNGGGGGGGAGSGGGPGAEPDLKNSNGNAGPRPALNNNLPEPPGGGGGGGSSSSDGVGAPPHSAAAALPPPAYGFGQAYGRSPSAVAAAAAAVFHQQHGGQQSPGLAALQSGGGGGLEPYAGPQQNSHDHGFPNHQYNSYYPNRSAYPPPPQAYALSSPRGGTPGSGAAAAAGSKPPPSSSASASSSSSSFAQQRFGAMGGGGPSAAGGGTPQPTATPTLNQLLTSPSSARGYQGYPGGDYGGGPQDGGAGKGPADMASQCWGAAAAAAAAAAAVSGGAQQRSHHAPMSPGSSGGGGQPLARTPQSSSPMDQMGKMRPQPYGGTNPYSQQQGPPSGPQQGHGYPGQPYGSQTPQRYPMTMQGRAQSAMGSLSYAQQIPPYGQQGPSAYGQQGQTPYYNQQSPHPQQQPPYAQQPPSQTPHAQPSYQQQPQTQQPQLQSSQPPYSQQPSQPPHQQSPTPYPSQQSTTQQHPQSQPPYSQPQAQSPYQQQQPQQPASSSLSQQAAYPQPQPQQSQQTAYSQQRFPPPQELSQDSFGSQASSAPSMTSSKGGQEDMNLSLQSRPSSLPDLSGSIDDLPMGTEGALSPGVSTSGISSSQGEQSNPAQSPFSPHTSPHLPGIRGPSPSPVGSPASVAQSRSGPLSPAAVPGNQMPPRPPSGQSDSIMHPSMNQSSIAQDRGYMQRNPQMPQYTSPQPGSALSPRQPSGGQMHSGVGSYQQNSMGSYGPQGSQYGPQGGYPRQPNYNALPNANYPNAGMAGSMNPMGAGGQMHGQPGIPPYGTLPPGRMAHASMGNRPYGPNMANMPPQVGSGMCPPPGGMNRKTQESAVAMHVAANSIQNRPPGYPNMNQGGMMGTGPPYGQGINSMAGMINPQGPPYPMGGTMANNSAGMAASPEMMGLGDVKLTPATKMNNKADGTPKTESKSKKSSSSTTTNEKITKLYELGGEPERKMWVDRYLAFTEEKAMGMTNLPAVGRKPLDLYRLYVSVKEIGGLTQVNKNKKWRELATNLNVGTSSSAASSLKKQYIQCLYAFECKIERGEDPPPDIFAAADSKKSQPKIQPPSPAGSGSMQGPQTPQSTSSSMAEGGDLKPPTPASTPHSQIPPLPGMSRSNSVGIQDAFPDGSDPTFQKRNSMTPNPGYQPSMNTSDMMGRMSYEPNKDPYGSMRKAPGSDPFMSSGQGPNGGMGDPYSRAAGPGLGSVAMGPRQHYPYGGPYDRVRTEPGIGPEGNMGTGAPQPNLMPSTPDSGMYSPSRYPPQQQQQQQQQHDSYGNQFSTQGTPSSSPFPSQQTTMYQQQQQNYKRPMDGTYGPPAKRHEGEMYSVPYSAGQGQPQQQQLPAAQSQPASQPQAAQPSPQQDVYNQYSNAYPASATAATDRRPAGGPQNQFPFQFGRDRVSAPPGSSAQQNMPPQMMGGPIQASAEVAQQGTMWQGRNDMTYNYANRQNTGSATQGPAYHGVNRTDEMLHTDQRANHEGPWPSHGTRQPPYGPSAPVPPMTRPPPSNYQPPPSMPNHIPQVSSPAPLPRPMENRTSPSKSPFLHSGMKMQKAGPPVPASHIAPTPVQPPMIRRDITFPPGSVEATQPVLKQRRRLTMKDIGTPEAWRVMMSLKSGLLAESTWALDTINILLYDDNSIMTFNLSQLPGLLELLVEYFRRCLIEIFGILKEYEVGDPGQRTLLDPGRFTKVYSPAHTEEEEEEHLDPKLEEEEEEGVGNDEEMAFLGKDKPSSENNEEKLVSKFDKLPVKIVQRNDPFVVDCSDKLGRVQEFDSGLLHWRIGGGDTTEHIQTHFESKIELLPSRPYVPCPTPPRKHLTTVEGTPGTTEQEGPPPDGLPEKRITATMDDMLSTRSSTLTDEGAKSAEATKESSKFPFGISPAQSHRNIKILEDEPHSKDETPLCTLLDWQDSLAKRCVCVSNTIRSLSFVPGNDFEMSKHPGLLLILGKLILLHHKHPERKQAPLTYEKEEEQDQGVSCDKVEWWWDCLEMLRENTLVTLANISGQLDLSPYPESICLPVLDGLLHWAVCPSAEAQDPFSTLGPNAVLSPQRLVLETLSKLSIQDNNVDLILATPPFSRLEKLYSTMVRFLSDRKNPVCREMAVVLLANLAQGDSLAARAIAVQKGSIGNLLGFLEDSLAATQFQQSQASLLHMQNPPFEPTSVDMMRRAARALLALAKVDENHSEFTLYESRLLDISVSPLMNSLVSQVICDVLFLIGQS

SEQ ID NO: 52 - DNA, 9609 bp, Homo sapiens
atggcccataacgcgggcgccgcggccgccgccggcacccacagcgccaagagcggcggctccgaggcggctctcaaggagggtggaagcgccgccgcgctgtcctcctcctcctcctcctccgcggcggcagcggcggcatcctcttcctcctcgtcgggcccgggctcggccatggagacggggctgctccccaaccacaaactgaaaaccgttggcgaagcccccgccgcgccgccccaccagcagcaccaccaccaccaccatgcccaccaccaccaccaccatgcccaccacctccaccaccaccacgcactacagcagcagctaaaccagttccagcagcagcagcagcagcagcaacagcagcagcagcagcagcagcaacagcaacatcccatttccaacaacaacagcttgggcggcgcgggcggcggcgcgcctcagcccggccccgacatggagcagccgcaacatggaggcgccaaggacagtgctgcgggcggccaggccgaccccccgggcccgccgctgctgagcaagccgggcgacgaggacgacgcgccgcccaagatgggggagccggcgggcggccgctacgagcacccgggcttgggcgccctgggcacgcagcagccgccggtcgccgtgcccgggggcggcggcggcccggcggccgtcccggagtttaataattactatggcagcgctgcccctgcgagcggcggccccggcggccgcgctgggccttgctttgatcaacatggcggacaacaaagccccgggatggggatgatgcactccgcctccgccgccgccgccggggcccccggcagcatggaccccctgcagaactcccacgaagggtaccccaacagccagtgcaaccattatccgggctacagccggcccggcgcgggcggcggcggcggcggcggcggcggaggaggaggaggcagcggaggaggaggaggaggaggaggagcaggagcaggaggagcaggagcgggagctgtggcggcggcggccgcggcggcggcggcagcagcaggaggcggcggcggcggcggctatgggggctcgtccgcggggtacggggtgctgagctccccccggcagcagggcggcggcatgatgatgggccccgggggcggcggggccgcgagcctcagcaaggcggccgccggctcggcggcggggggcttccagcgcttcgccggccagaaccagcacccgtcgggggccaccccgaccctcaatcagctgctcacctcgcccagccccatgatgcggagctacggcggcagctaccccgagtacagcagccccagcgcgccgccgccgccgccgtcgcagccccagtcccaggcggcggcggcgggggcggcggcgggcggccagcaggcggccgcgggcatgggcttgggcaaggacatgggcgcccagtacgccgctgccagcccggcctgggcggccgcgcaacaaaggagtcacccggcgatgagccccggcacccccggaccgaccatgggcagatcccagggcagcccaatggatccaatggtgatgaagagacctcagttgtatggcatgggcagtaaccctcattctcagcctcagcagagcagtccgtacccaggaggttcctatggccctccaggcccacagcggtatccaattggcatccagggtcggactcccggggccatggccggaatgcagtaccctcagcagcagatgccacctcagtatggacagcaaggtgtgagtggttactgccagcagggccaacagccatattacagccagcagccgcagcccccgcacctcccaccccaggcgcagtatctgccgtcccagtcccagcagaggtaccagccgcagcaggacatgtctcaggaaggctatggaactagatctcaacctcctctggcccccggaaaacctaaccatgaagacttgaacttaatacagcaagaaagaccatcaagtttaccagatctgtctggctccattgatgacctccccacgggaacggaagcaactttgagctcagcagtcagtgcatccgggtccacgagcagccaaggggatcagagcaacccggcgcagtcgcctttctccccacatgcgtcccctcatctctccagcatcccggggggcccatctccctctcctgttggctctcctgtaggaagcaaccagtctcgatctggcccaatctctcctgcaagtatcccaggtagtcagatgcctccgcagccacccgggagccagtcagaatccagttcccatcccgccttgagccagtcaccaatgccacaggaaagaggttttatggcaggcacacaaagaaaccctcagatggctcagtatggacctcaacagacaggaccatccatgtcgcctcatccttctcctgggggccagatgcatgctggaatcagtagctttcagcagagtaactcaagtgggacttacggtccacagatgagccagtatggaccacaaggtaactactccagacccccagcgtatagtggggtgcccagtgcaagctacagcggcccagggcccggtatgggtatcagtgccaacaaccagatgcatggacaagggccaagccagccatgtggtgctgtgcccctgggacgaatgccatcagctgggatgcagaacagaccatttcctggaaatatgagcagcatgacccccagttctcctggcatgtctcagcagggagggccaggaatggggccgccaatgccaactgtgaaccgtaaggcacaggaggcagccgcagcagtgatgcaggctgctgcgaactcagcacaaagcaggcaaggcagtttccccggcatgaaccagagtggacttatggcttccagctctccctacagccagcccatgaacaacagctctagcctgatgaacacgcaggcgccgccctacagcatggcgcccgccatggtgaacagctcggcagcatctgtgggtcttgcagatatgatgtctcctggtgaatccaaactgcccctgcctctcaaagcagacggcaaagaagaaggcactccacagcccgagagcaagtcaaagaagtccagctcctccaccactactggggagaagatcacgaaggtgtacgagctggggaatgagccagagagaaagctctgggtcgaccgatacctcaccttcatggaagagagaggctctcctgtctcaagtctgcctgccgtgggcaagaagcccctggacctgttccgactctacgtctgcgtcaaagagatcgggggtttggcccaggttaataaaaacaagaagtggcgtgagctggcaaccaacctaaacgttggcacctcaagcagtgcagcgagctccctgaaaaagcagtatattcagtacctgtttgcctttgagtgcaagatcgaacgtggggaggagcccccgccggaagtcttcagcaccggggacaccaaaaagcagcccaagctccagccgccatctcctgctaactcgggatccttgcaaggcccacagaccccccagtcaactggcagcaattccatggcagaggttccaggtgacctgaagccacctaccccagcctccacccctcacggccagatgactccaatgcaaggtggaagaagcagtacaatcagtgtgcacgacccattctcagatgtgagtgattcatccttcccgaaacggaactccatgactccaaacgccccctaccagcagggcatgagcatgcccgatgtgatgggcaggatgccctatgagcccaacaaggacccctttgggggaatgagaaaagtgcctggaagcagcgagccctttatgacgcaaggacagatgcccaacagcagcatgcaggacatgtacaaccaaagtccctccggagcaatgtctaacctgggcatggggcagcgccagcagtttccctatggagccagttacgaccgaaggcatgaaccttatgggcagcagtatccaggccaaggccctccctcgggacagccgccgtatggagggcaccagcccggcctgtacccacagcagccgaattacaaacgccatatggacggcatgtacgggcccccagccaagcgccacgagggcgacatgtacaacatgcagtacagcagccagcagcaggagatgtacaaccagtatggaggctcctactcgggcccggaccgcaggcccatccagggccagtacccgtatccctacagcagggagaggatgcagggcccggggcagatccagacacacggaatcccgcctcagatgatgggcggcccgctgcagtcgtcctccagtgaggggcctcagcagaatatgtgggcagcacgcaatgatatgccttatccctaccagaacaggcagggccctggcggccctacacaggcgcccccttacccaggcatgaaccgcacagacgatatgatggtacccgatcagaggataaatcatgagagccagtggccttctcacgtcagccagcgtcagccttatatgtcgtcctcagcctccatgcagcccatcacacgcccaccacagccgtcctaccagacgccaccgtcactgccaaatcacatctccagggcgcccagcccagcgtccttccagcgctccctggagaaccgcatgtctccaagcaagtctccttttctgccgtctatgaagatgcagaaggtcatgcccacggtccccacatcccaggtcaccgggccaccaccccaaccacccccaatcagaagggagatcacctttcctcctggctcagtagaagcatcacaaccagtcttgaaacaaaggcgaaagattacctccaaagatatcgttactcctgaggcgtggcgtgtgatgatgtcccttaaatcaggtcttttggctgagagtacgtgggctttggacactattaatattcttctgtatgatgacagcactgttgctactttcaatctctcccagttgtctggatttctcgaacttttagtcgagtactttagaaaatgcctgattgacatttttggaattcttatggaatatgaagtgggagaccccagccaaaaagcacttgatcacaacgcagcaaggaaggatgacagccagtccttggcagacgattctgggaaagaggaggaagatgctgaatgtattgatgacgacgaggaagacgaggaggatgaggaggaagacagcgagaagacagaaagcgatgaaaagagcagcatcgctctgactgccccggacgccgctgcagacccaaaggagaagcccaagcaagccagtaagttcgacaagctgccaataaagatagtcaaaaagaacaacctgtttgttgttgaccgatctgacaagttggggcgtgtgcaggagttcaatagtggccttctgcactggcagctcggcgggggtgacaccaccgagcacattcagactcactttgagagcaagatggaaattcctcctcgcaggcgcccacctccccccttaagctccgcaggtagaaagaaagagcaagaaggcaaaggcgactctgaagagcagcaagagaaaagcatcatagcaaccatcgatgacgtcctctctgctcggccaggggcattgcctgaagacgcaaaccctgggccccagaccgaaagcagtaagtttccctttggtatccagcaagccaaaagtcaccggaacatcaagctgctggaggacgagcccaggagccgagacgagactcctctgtgtaccatcgcgcactggcaggactcgctggctaagcgatgcatctgtgtgtccaatattgtccgtagcttgtcattcgtgcctggcaatgatgccgaaatgtccaaacatccaggcctggtgctgatcctggggaagctgattcttcttcaccacgagcatccagagagaaagcgagcaccgcagacctatgagaaagaggaggatgaggacaagggggtggcctgcagcaaagatgagtggtggtgggactgcctcgaggtcttgagggataacacgttggtcacgttggccaacatttccgggcagctagacttgtctgcttacacggaaagcatctgcttgccaattttggatggcttgctgcactggatggtgtgcccgtctgcagaggcacaagatccctttccaactgtgggacccaactcggtcctgtcgcctcagagacttgtgctggagaccctctgtaaactcagtatccaggacaataatgtggacctgatcttggccactcctccatttagtcgtcaggagaaattctatgctacattagttaggtacgttggggatcgcaaaaacccagtctgtcgagaaatgtccatggcgcttttatcgaaccttgcccaaggggacgcactagcagcaagggccatagctgtgcagaaaggaagcattggaaacttgataagcttcctagaggatggggtcacgatggcccagtaccagcagagccagcacaacctcatgcacatgcagcccccgcccctggaaccacctagcgtagacatgatgtgcagggcggccaaggctttgctagccatggccagagtggacgaaaaccgctcggaattccttttgcacgagggccggttgctggatatctcgatatcagctgtcctgaactctctggttgcatctgtcatctgtgatgtactgtttcagattgggcagttatgacataagtgagaaggcaagcatgtgtgagtgaagattagagggtcacatataactggctgttttctgttcttgtttatccagcgtaggaagaaggaaaagaaaatctttgctcctctgccccattcactatttaccaattgggaattaaagaaataattaatttgaacagttatgaaattaatatttgctgtctgtgtgtataagtacatcctttggggttttttttttctcttttttttaaccaaagttgctgtctagtgcattcaaaggtcactttttgttcttcacagatctttttaatgttctttcccatgttgtattgcatttttgggggaagcaaattgactttaaagaaaaaagttgtggcaaaagatgctaagatgcgaaaatttcaccacactgagtcaaaaaggtgaaaaattatccatttcctatgcgttttactcctcagagaatgaaaaaaactgcatcccatcacccaaagttctgtgcaatagaaatttctacagatacaggtataggggctcaaggaggtatgtcggtcagtagtcaaaactatgaaatgatactggtttctccacaggaatatggttccattaggctgggagcaaaaacaatgttttttaagattgagaatacatacctgacaacgatccggaaactgctcctcaccactcccgtcatgcctgctgtcggcgtttgaccttccacgtgacagttcttcacaattcctttcatcattttttaaatattttttttactgcctatgggctgtgatgtatatagaagttgtacattaaacataccctcatttttttcttttcttttttttttttttttttagtacaaagttttagtttctttttcatgatgtggtaactacgaagtgatggtagatttaaataattttttatttttattttatatattttttcattagggccatatctccaaaaaaagaaagaaaaaatacaaaaaacaaaaacaaaaaaaaaagagggtaatgtacaagtttctgtatgtataaagtcatgctcgatttcaggagagcagctgatcacaatttgcttcatgaatcaaggtgtggaaatggttatatatggattgatttagaaaatggttaccagtacagtcaaaaaagagaaaatgaaaaaaatacaactaaaaggaagaaacacaacttcaaagatttttcagtgatgagaatccacatttgtatttcaagataatgtagtttaaaaaaaaaaaaaagaaaaaaacttgatgtaaattcctccttttcctctggcttaatgaatatcatttattcagtataaaatctttatatgttccacatgttaagaataaatgtacattaaatcttgttaagcactgtgatgggtgttcttgaatactgttctagtttccttaaagtggtttcctagtaatcaagttatttacaagaaataggggaatgcagcagtgtattcacattataaaaccctacatttggaagagacctttaggggttacctactttagagtggggagcaacagtttgattttctcaaattacttagctaattagtctttctttgaagcaattaactctaacgacattgaggtatgatcattttcagtatttatgggaggtggctgctgacccacttgaggtgagatctcagaagcttaactggcctgaaaatgtaacattctgccttttactaactccatcttagtttaatcaaagttcaatctattccttgtttcttctgtgtgcctcagagttattttgcatttagtttactccaccgtgtataatatttatactgtgcaatgttaaaaaagaatctgttatattgtatgtggtgtacatagtgcaaagtgatgatttctatttcagggcatattatggttctcatattccttcctacctggtgcacagtagctttttaatactagtcacttctaatttaaactttctcttcctgggtcattgactgttactgtgtaataatcgatttctttgaaactgctgcataattatgctgttagtggacctctacctcttctcttccctctcccaatcacagtatactcagaatccccagcccctcgcatacattgtgtcggttcacattactcacagtaatatatggaagagttagacaagaacatgcagttacagtcattgtgagacgtgactctccagtgtcacgaggaaaaaaatcatcttttctgcaaacagtctctcatctgtcaactcccacattactgagtcaaacagtcttcttacataacaatgcaaccaaatatatgttgaattaaagacccatttataattctgctttaaatacatctgcttgctaagaacagatttcagtgctccaagcttcaaatatggagatttgtaagagggaattcaatattattctaatttctctcttacagagtacaaataaaaggtgtatacaaactccgaacatatccagtattccaattcctttgtcaatcagaagagtaaaataattaacaaaagactgttgttatggtttgcattgtaaccgatacgcagagtctgaccgttgggcaacaagtttttctatcctgatgcgcaacacagtctctagagactaatccaggaagactttagcctcctttccatattctcacccccgaatcaagatttacagaagcccacgaagaatttacagcctgcttgagatcatcttgcctataaactgagttattgctttgtcctaaaaattagtcggtttttttttttctatgaggcttttcagaaatttacaggatgcccagactttacatgtgtaccaaaaaaaaaaaaaagataaaaaataaaggtgcaaagaaagtttagtattttggaatggtgctataaagttgaaaaaaaaaaaa

SEQ ID NO: 53 - protein, 2236 aa, Homo sapiens
MAHNAGAAAAAGTHSAKSGGSEAALKEGGSAAALSSSSSSSAAAAAASSSSSSGPGSAMETGLLPNHKLKTVGEAPAAPPHQQHHHHHHAHHHHHHAHHLHHHHALQQQLNQFQQQQQQQQQQQQQQQQQQHPISNNNSLGGAGGGAPQPGPDMEQPQHGGAKDSAAGGQADPPGPPLLSKPGDEDDAPPKMGEPAGGRYEHPGLGALGTQQPPVAVPGGGGGPAAVPEFNNYYGSAAPASGGPGGRAGPCFDQHGGQQSPGMGMMHSASAAAAGAPGSMDPLQNSHEGYPNSQCNHYPGYSRPGAGGGGGGGGGGGGGSGGGGGGGGAGAGGAGAGAVAAAAAAAAAAAGGGGGGGYGGSSAGYGVLSSPRQQGGGMMMGPGGGGAASLSKAAAGSAAGGFQRFAGQNQHPSGATPTLNQLLTSPSPMMRSYGGSYPEYSSPSAPPPPPSQPQSQAAAAGAAAGGQQAAAGMGLGKDMGAQYAAASPAWAAAQQRSHPAMSPGTPGPTMGRSQGSPMDPMVMKRPQLYGMGSNPHSQPQQSSPYPGGSYGPPGPQRYPIGIQGRTPGAMAGMQYPQQQMPPQYGQQGVSGYCQQGQQPYYSQQPQPPHLPPQAQYLPSQSQQRYQPQQDMSQEGYGTRSQPPLAPGKPNHEDLNLIQQERPSSLPDLSGSIDDLPTGTEATLSSAVSASGSTSSQGDQSNPAQSPFSPHASPHLSSIPGGPSPSPVGSPVGSNQSRSGPISPASIPGSQMPPQPPGSQSESSSHPALSQSPMPQERGFMAGTQRNPQMAQYGPQQTGPSMSPHPSPGGQMHAGISSFQQSNSSGTYGPQMSQYGPQGNYSRPPAYSGVPSASYSGPGPGMGISANNQMHGQGPSQPCGAVPLGRMPSAGMQNRPFPGNMSSMTPSSPGMSQQGGPGMGPPMPTVNRKAQEAAAAVMQAAANSAQSRQGSFPGMNQSGLMASSSPYSQPMNNSSSLMNTQAPPYSMAPAMVNSSAASVGLADMMSPGESKLPLPLKADGKEEGTPQPESKSKKSSSSTTTGEKITKVYELGNEPERKLWVDRYLTFMEERGSPVSSLPAVGKKPLDLFRLYVCVKEIGGLAQVNKNKKWRELATNLNVGTSSSAASSLKKQYIQYLFAFECKIERGEEPPPEVFSTGDTKKQPKLQPPSPANSGSLQGPQTPQSTGSNSMAEVPGDLKPPTPASTPHGQMTPMQGGRSSTISVHDPFSDVSDSSFPKRNSMTPNAPYQQGMSMPDVMGRMPYEPNKDPFGGMRKVPGSSEPFMTQGQMPNSSMQDMYNQSPSGAMSNLGMGQRQQFPYGASYDRRHEPYGQQYPGQGPPSGQPPYGGHQPGLYPQQPNYKRHMDGMYGPPAKRHEGDMYNMQYSSQQQEMYNQYGGSYSGPDRRPIQGQYPYPYSRERMQGPGQIQTHGIPPQMMGGPLQSSSSEGPQQNMWAARNDMPYPYQNRQGPGGPTQAPPYPGMNRTDDMMVPDQRINHESQWPSHVSQRQPYMSSSASMQPITRPPQPSYQTPPSLPNHISRAPSPASFQRSLENRMSPSKSPFLPSMKMQKVMPTVPTSQVTGPPPQPPPIRREITFPPGSVEASQPVLKQRRKITSKDIVTPEAWRVMMSLKSGLLAESTWALDTINILLYDDSTVATFNLSQLSGFLELLVEYFRKCLIDIFGILMEYEVGDPSQKALDHNAARKDDSQSLADDSGKEEEDAECIDDDEEDEEDEEEDSEKTESDEKSSIALTAPDAAADPKEKPKQASKFDKLPIKIVKKNNLFVVDRSDKLGRVQEFNSGLLHWQLGGGDTTEHIQTHFESKMEIPPRRRPPPPLSSAGRKKEQEGKGDSEEQQEKSIIATIDDVLSARPGALPEDANPGPQTESSKFPFGIQQAKSHRNIKLLEDEPRSRDETPLCTIAHWQDSLAKRCICVSNIVRSLSFVPGNDAEMSKHPGLVLILGKLILLHHEHPERKRAPQTYEKEEDEDKGVACSKDEWWWDCLEVLRDNTLVTLANISGQLDLSAYTESICLPILDGLLHWMVCPSAEAQDPFPTVGPNSVLSPQRLVLETLCKLSIQDNNVDLILATPPFSRQEKFYATLVRYVGDRKNPVCREMSMALLSNLAQGDALAARAIAVQKGSIGNLISFLEDGVTMAQYQQSQHNLMHMQPPPLEPPSVDMMCRAAKALLAMARVDENRSEFLLHEGRLLDISISAVLNSLVASVICDVLFQIGQL

SEQ ID NO: 54 - DNA, 9648 bp, Homo sapiens
atggcccataacgcgggcgccgcggccgccgccggcacccacagcgccaagagcggcggctccgaggcggctctcaaggagggtggaagcgccgccgcgctgtcctcctcctcctcctcctccgcggcggcagcggcggcatcctcttcctcctcgtcgggcccgggctcggccatggagacggggctgctccccaaccacaaactgaaaaccgttggcgaagcccccgccgcgccgccccaccagcagcaccaccaccaccaccatgcccaccaccaccaccaccatgcccaccacctccaccaccaccacgcactacagcagcagctaaaccagttccagcagcagcagcagcagcagcaacagcagcagcagcagcagcagcaacagcaacatcccatttccaacaacaacagcttgggcggcgcgggcggcggcgcgcctcagcccggccccgacatggagcagccgcaacatggaggcgccaaggacagtgctgcgggcggccaggccgaccccccgggcccgccgctgctgagcaagccgggcgacgaggacgacgcgccgcccaagatgggggagccggcgggcggccgctacgagcacccgggcttgggcgccctgggcacgcagcagccgccggtcgccgtgcccgggggcggcggcggcccggcggccgtcccggagtttaataattactatggcagcgctgcccctgcgagcggcggccccggcggccgcgctgggccttgctttgatcaacatggcggacaacaaagccccgggatggggatgatgcactccgcctccgccgccgccgccggggcccccggcagcatggaccccctgcagaactcccacgaagggtaccccaacagccagtgcaaccattatccgggctacagccggcccggcgcgggcggcggcggcggcggcggcggcggaggaggaggaggcagcggaggaggaggaggaggaggaggagcaggagcaggaggagcaggagcgggagctgtggcggcggcggccgcggcggcggcggcagcagcaggaggcggcggcggcggcggctatgggggctcgtccgcggggtacggggtgctgagctccccccggcagcagggcggcggcatgatgatgggccccgggggcggcggggccgcgagcctcagcaaggcggccgccggctcggcggcggggggcttccagcgcttcgccggccagaaccagcacccgtcgggggccaccccgaccctcaatcagctgctcacctcgcccagccccatgatgcggagctacggcggcagctaccccgagtacagcagccccagcgcgccgccgccgccgccgtcgcagccccagtcccaggcggcggcggcgggggcggcggcgggcggccagcaggcggccgcgggcatgggcttgggcaaggacatgggcgcccagtacgccgctgccagcccggcctgggcggccgcgcaacaaaggagtcacccggcgatgagccccggcacccccggaccgaccatgggcagatcccagggcagcccaatggatccaatggtgatgaagagacctcagttgtatggcatgggcagtaaccctcattctcagcctcagcagagcagtccgtacccaggaggttcctatggccctccaggcccacagcggtatccaattggcatccagggtcggactcccggggccatggccggaatgcagtaccctcagcagcaggactctggagatgccacatggaaagaaacattctggttgatgccacctcagtatggacagcaaggtgtgagtggttactgccagcagggccaacagccatattacagccagcagccgcagcccccgcacctcccaccccaggcgcagtatctgccgtcccagtcccagcagaggtaccagccgcagcaggacatgtctcaggaaggctatggaactagatctcaacctcctctggcccccggaaaacctaaccatgaagacttgaacttaatacagcaagaaagaccatcaagtttaccagatctgtctggctccattgatgacctccccacgggaacggaagcaactttgagctcagcagtcagtgcatccgggtccacgagcagccaaggggatcagagcaacccggcgcagtcgcctttctccccacatgcgtcccctcatctctccagcatcccggggggcccatctccctctcctgttggctctcctgtaggaagcaaccagtctcgatctggcccaatctctcctgcaagtatcccaggtagtcagatgcctccgcagccacccgggagccagtcagaatccagttcccatcccgccttgagccagtcaccaatgccacaggaaagaggttttatggcaggcacacaaagaaaccctcagatggctcagtatggacctcaacagacaggaccatccatgtcgcctcatccttctcctgggggccagatgcatgctggaatcagtagctttcagcagagtaactcaagtgggacttacggtccacagatgagccagtatggaccacaaggtaactactccagacccccagcgtatagtggggtgcccagtgcaagctacagcggcccagggcccggtatgggtatcagtgccaacaaccagatgcatggacaagggccaagccagccatgtggtgctgtgcccctgggacgaatgccatcagctgggatgcagaacagaccatttcctggaaatatgagcagcatgacccccagttctcctggcatgtctcagcagggagggccaggaatggggccgccaatgccaactgtgaaccgtaaggcacaggaggcagccgcagcagtgatgcaggctgctgcgaactcagcacaaagcaggcaaggcagtttccccggcatgaaccagagtggacttatggcttccagctctccctacagccagcccatgaacaacagctctagcctgatgaacacgcaggcgccgccctacagcatggcgcccgccatggtgaacagctcggcagcatctgtgggtcttgcagatatgatgtctcctggtgaatccaaactgcccctgcctctcaaagcagacggcaaagaagaaggcactccacagcccgagagcaagtcaaagaagtccagctcctccaccactactggggagaagatcacgaaggtgtacgagctggggaatgagccagagagaaagctctgggtcgaccgatacctcaccttcatggaagagagaggctctcctgtctcaagtctgcctgccgtgggcaagaagcccctggacctgttccgactctacgtctgcgtcaaagagatcgggggtttggcccaggttaataaaaacaagaagtggcgtgagctggcaaccaacctaaacgttggcacctcaagcagtgcagcgagctccctgaaaaagcagtatattcagtacctgtttgcctttgagtgcaagatcgaacgtggggaggagcccccgccggaagtcttcagcaccggggacaccaaaaagcagcccaagctccagccgccatctcctgctaactcgggatccttgcaaggcccacagaccccccagtcaactggcagcaattccatggcagaggttccaggtgacctgaagccacctaccccagcctccacccctcacggccagatgactccaatgcaaggtggaagaagcagtacaatcagtgtgcacgacccattctcagatgtgagtgattcatccttcccgaaacggaactccatgactccaaacgccccctaccagcagggcatgagcatgcccgatgtgatgggcaggatgccctatgagcccaacaaggacccctttgggggaatgagaaaagtgcctggaagcagcgagccctttatgacgcaaggacagatgcccaacagcagcatgcaggacatgtacaaccaaagtccctccggagcaatgtctaacctgggcatggggcagcgccagcagtttccctatggagccagttacgaccgaaggcatgaaccttatgggcagcagtatccaggccaaggccctccctcgggacagccgccgtatggagggcaccagcccggcctgtacccacagcagccgaattacaaacgccatatggacggcatgtacgggcccccagccaagcgccacgagggcgacatgtacaacatgcagtacagcagccagcagcaggagatgtacaaccagtatggaggctcctactcgggcccggaccgcaggcccatccagggccagtacccgtatccctacagcagggagaggatgcagggcccggggcagatccagacacacggaatcccgcctcagatgatgggcggcccgctgcagtcgtcctccagtgaggggcctcagcagaatatgtgggcagcacgcaatgatatgccttatccctaccagaacaggcagggccctggcggccctacacaggcgcccccttacccaggcatgaaccgcacagacgatatgatggtacccgatcagaggataaatcatgagagccagtggccttctcacgtcagccagcgtcagccttatatgtcgtcctcagcctccatgcagcccatcacacgcccaccacagccgtcctaccagacgccaccgtcactgccaaatcacatctccagggcgcccagcccagcgtccttccagcgctccctggagaaccgcatgtctccaagcaagtctccttttctgccgtctatgaagatgcagaaggtcatgcccacggtccccacatcccaggtcaccgggccaccaccccaaccacccccaatcagaagggagatcacctttcctcctggctcagtagaagcatcacaaccagtcttgaaacaaaggcgaaagattacctccaaagatatcgttactcctgaggcgtggcgtgtgatgatgtcccttaaatcaggtcttttggctgagagtacgtgggctttggacactattaatattcttctgtatgatgacagcactgttgctactttcaatctctcccagttgtctggatttctcgaacttttagtcgagtactttagaaaatgcctgattgacatttttggaattcttatggaatatgaagtgggagaccccagccaaaaagcacttgatcacaacgcagcaaggaaggatgacagccagtccttggcagacgattctgggaaagaggaggaagatgctgaatgtattgatgacgacgaggaagacgaggaggatgaggaggaagacagcgagaagacagaaagcgatgaaaagagcagcatcgctctgactgccccggacgccgctgcagacccaaaggagaagcccaagcaagccagtaagttcgacaagctgccaataaagatagtcaaaaagaacaacctgtttgttgttgaccgatctgacaagttggggcgtgtgcaggagttcaatagtggccttctgcactggcagctcggcgggggtgacaccaccgagcacattcagactcactttgagagcaagatggaaattcctcctcgcaggcgcccacctccccccttaagctccgcaggtagaaagaaagagcaagaaggcaaaggcgactctgaagagcagcaagagaaaagcatcatagcaaccatcgatgacgtcctctctgctcggccaggggcattgcctgaagacgcaaaccctgggccccagaccgaaagcagtaagtttccctttggtatccagcaagccaaaagtcaccggaacatcaagctgctggaggacgagcccaggagccgagacgagactcctctgtgtaccatcgcgcactggcaggactcgctggctaagcgatgcatctgtgtgtccaatattgtccgtagcttgtcattcgtgcctggcaatgatgccgaaatgtccaaacatccaggcctggtgctgatcctggggaagctgattcttcttcaccacgagcatccagagagaaagcgagcaccgcagacctatgagaaagaggaggatgaggacaagggggtggcctgcagcaaagatgagtggtggtgggactgcctcgaggtcttgagggataacacgttggtcacgttggccaacatttccgggcagctagacttgtctgcttacacggaaagcatctgcttgccaattttggatggcttgctgcactggatggtgtgcccgtctgcagaggcacaagatccctttccaactgtgggacccaactcggtcctgtcgcctcagagacttgtgctggagaccctctgtaaactcagtatccaggacaataatgtggacctgatcttggccactcctccatttagtcgtcaggagaaattctatgctacattagttaggtacgttggggatcgcaaaaacccagtctgtcgagaaatgtccatggcgcttttatcgaaccttgcccaaggggacgcactagcagcaagggccatagctgtgcagaaaggaagcattggaaacttgataagcttcctagaggatggggtcacgatggcccagtaccagcagagccagcacaacctcatgcacatgcagcccccgcccctggaaccacctagcgtagacatgatgtgcagggcggccaaggctttgctagccatggccagagtggacgaaaaccgctcggaattccttttgcacgagggccggttgctggatatctcgatatcagctgtcctgaactctctggttgcatctgtcatctgtgatgtactgtttcagattgggcagttatgacataagtgagaaggcaagcatgtgtgagtgaagattagagggtcacatataactggctgttttctgttcttgtttatccagcgtaggaagaaggaaaagaaaatctttgctcctctgccccattcactatttaccaattgggaattaaagaaataattaatttgaacagttatgaaattaatatttgctgtctgtgtgtataagtacatcctttggggttttttttttctcttttttttaaccaaagttgctgtctagtgcattcaaaggtcactttttgttcttcacagatctttttaatgttctttcccatgttgtattgcatttttgggggaagcaaattgactttaaagaaaaaagttgtggcaaaagatgctaagatgcgaaaatttcaccacactgagtcaaaaaggtgaaaaattatccatttcctatgcgttttactcctcagagaatgaaaaaaactgcatcccatcacccaaagttctgtgcaatagaaatttctacagatacaggtataggggctcaaggaggtatgtcggtcagtagtcaaaactatgaaatgatactggtttctccacaggaatatggttccattaggctgggagcaaaaacaatgttttttaagattgagaatacatacctgacaacgatccggaaactgctcctcaccactcccgtcatgcctgctgtcggcgtttgaccttccacgtgacagttcttcacaattcctttcatcattttttaaatattttttttactgcctatgggctgtgatgtatatagaagttgtacattaaacataccctcatttttttcttttcttttttttttttttttttagtacaaagttttagtttctttttcatgatgtggtaactacgaagtgatggtagatttaaataattttttatttttattttatatattttttcattagggccatatctccaaaaaaagaaagaaaaaatacaaaaaacaaaaacaaaaaaaaaagagggtaatgtacaagtttctgtatgtataaagtcatgctcgatttcaggagagcagctgatcacaatttgcttcatgaatcaaggtgtggaaatggttatatatggattgatttagaaaatggttaccagtacagtcaaaaaagagaaaatgaaaaaaatacaactaaaaggaagaaacacaacttcaaagatttttcagtgatgagaatccacatttgtatttcaagataatgtagtttaaaaaaaaaaaaaagaaaaaaacttgatgtaaattcctccttttcctctggcttaatgaatatcatttattcagtataaaatctttatatgttccacatgttaagaataaatgtacattaaatcttgttaagcactgtgatgggtgttcttgaatactgttctagtttccttaaagtggtttcctagtaatcaagttatttacaagaaataggggaatgcagcagtgtattcacattataaaaccctacatttggaagagacctttaggggttacctactttagagtggggagcaacagtttgattttctcaaattacttagctaattagtctttctttgaagcaattaactctaacgacattgaggtatgatcattttcagtatttatgggaggtggctgctgacccacttgaggtgagatctcagaagcttaactggcctgaaaatgtaacattctgccttttactaactccatcttagtttaatcaaagttcaatctattccttgtttcttctgtgtgcctcagagttattttgcatttagtttactccaccgtgtataatatttatactgtgcaatgttaaaaaagaatctgttatattgtatgtggtgtacatagtgcaaagtgatgatttctatttcagggcatattatggttctcatattccttcctacctggtgcacagtagctttttaatactagtcacttctaatttaaactttctcttcctgggtcattgactgttactgtgtaataatcgatttctttgaaactgctgcataattatgctgttagtggacctctacctcttctcttccctctcccaatcacagtatactcagaatccccagcccctcgcatacattgtgtcggttcacattactcacagtaatatatggaagagttagacaagaacatgcagttacagtcattgtgagacgtgactctccagtgtcacgaggaaaaaaatcatcttttctgcaaacagtctctcatctgtcaactcccacattactgagtcaaacagtcttcttacataacaatgcaaccaaatatatgttgaattaaagacccatttataattctgctttaaatacatctgcttgctaagaacagatttcagtgctccaagcttcaaatatggagatttgtaagagggaattcaatattattctaatttctctcttacagagtacaaataaaaggtgtatacaaactccgaacatatccagtattccaattcctttgtcaatcagaagagtaaaataattaacaaaagactgttgttatggtttgcattgtaaccgatacgcagagtctgaccgttgggcaacaagtttttctatcctgatgcgcaacacagtctctagagactaatccaggaagactttagcctcctttccatattctcacccccgaatcaagatttacagaagcccacgaagaatttacagcctgcttgagatcatcttgcctataaactgagttattgctttgtcctaaaaattagtcggtttttttttttctatgaggcttttcagaaatttacaggatgcccagactttacatgtgtaccaaaaaaaaaaaaaagataaaaaataaaggtgcaaagaaagtttagtattttggaatggtgctataaagttgaaaaaaaaaaaa

SEQ ID NO: 55 - protein, 2249 aa, Homo sapiens
MAHNAGAAAAAGTHSAKSGGSEAALKEGGSAAALSSSSSSSAAAAAASSSSSSGPGSAMETGLLPNHKLKTVGEAPAAPPHQQHHHHHHAHHHHHHAHHLHHHHALQQQLNQFQQQQQQQQQQQQQQQQQQHPISNNNSLGGAGGGAPQPGPDMEQPQHGGAKDSAAGGQADPPGPPLLSKPGDEDDAPPKMGEPAGGRYEHPGLGALGTQQPPVAVPGGGGGPAAVPEFNNYYGSAAPASGGPGGRAGPCFDQHGGQQSPGMGMMHSASAAAAGAPGSMDPLQNSHEGYPNSQCNHYPGYSRPGAGGGGGGGGGGGGGSGGGGGGGGAGAGGAGAGAVAAAAAAAAAAAGGGGGGGYGGSSAGYGVLSSPRQQGGGMMMGPGGGGAASLSKAAAGSAAGGFQRFAGQNQHPSGATPTLNQLLTSPSPMMRSYGGSYPEYSSPSAPPPPPSQPQSQAAAAGAAAGGQQAAAGMGLGKDMGAQYAAASPAWAAAQQRSHPAMSPGTPGPTMGRSQGSPMDPMVMKRPQLYGMGSNPHSQPQQSSPYPGGSYGPPGPQRYPIGIQGRTPGAMAGMQYPQQQDSGDATWKETFWLMPPQYGQQGVSGYCQQGQQPYYSQQPQPPHLPPQAQYLPSQSQQRYQPQQDMSQEGYGTRSQPPLAPGKPNHEDLNLIQQERPSSLPDLSGSIDDLPTGTEATLSSAVSASGSTSSQGDQSNPAQSPFSPHASPHLSSIPGGPSPSPVGSPVGSNQSRSGPISPASIPGSQMPPQPPGSQSESSSHPALSQSPMPQERGFMAGTQRNPQMAQYGPQQTGPSMSPHPSPGGQMHAGISSFQQSNSSGTYGPQMSQYGPQGNYSRPPAYSGVPSASYSGPGPGMGISANNQMHGQGPSQPCGAVPLGRMPSAGMQNRPFPGNMSSMTPSSPGMSQQGGPGMGPPMPTVNRKAQEAAAAVMQAAANSAQSRQGSFPGMNQSGLMASSSPYSQPMNNSSSLMNTQAPPYSMAPAMVNSSAASVGLADMMSPGESKLPLPLKADGKEEGTPQPESKSKKSSSSTTTGEKITKVYELGNEPERKLWVDRYLTFMEERGSPVSSLPAVGKKPLDLFRLYVCVKEIGGLAQVNKNKKWRELATNLNVGTSSSAASSLKKQYIQYLFAFECKIERGEEPPPEVFSTGDTKKQPKLQPPSPANSGSLQGPQTPQSTGSNSMAEVPGDLKPPTPASTPHGQMTPMQGGRSSTISVHDPFSDVSDSSFPKRNSMTPNAPYQQGMSMPDVMGRMPYEPNKDPFGGMRKVPGSSEPFMTQGQMPNSSMQDMYNQSPSGAMSNLGMGQRQQFPYGASYDRRHEPYGQQYPGQGPPSGQPPYGGHQPGLYPQQPNYKRHMDGMYGPPAKRHEGDMYNMQYSSQQQEMYNQYGGSYSGPDRRPIQGQYPYPYSRERMQGPGQIQTHGIPPQMMGGPLQSSSSEGPQQNMWAARNDMPYPYQNRQGPGGPTQAPPYPGMNRTDDMMVPDQRINHESQWPSHVSQRQPYMSSSASMQPITRPPQPSYQTPPSLPNHISRAPSPASFQRSLENRMSPSKSPFLPSMKMQKVMPTVPTSQVTGPPPQPPPIRREITFPPGSVEASQPVLKQRRKITSKDIVTPEAWRVMMSLKSGLLAESTWALDTINILLYDDSTVATFNLSQLSGFLELLVEYFRKCLIDIFGILMEYEVGDPSQKALDHNAARKDDSQSLADDSGKEEEDAECIDDDEEDEEDEEEDSEKTESDEKSSIALTAPDAAADPKEKPKQASKFDKLPIKIVKKNNLFVVDRSDKLGRVQEFNSGLLHWQLGGGDTTEHIQTHFESKMEIPPRRRPPPPLSSAGRKKEQEGKGDSEEQQEKSIIATIDDVLSARPGALPEDANPGPQTESSKFPFGIQQAKSHRNIKLLEDEPRSRDETPLCTIAHWQDSLAKRCICVSNIVRSLSFVPGNDAEMSKHPGLVLILGKLILLHHEHPERKRAPQTYEKEEDEDKGVACSKDEWWWDCLEVLRDNTLVTLANISGQLDLSAYTESICLPILDGLLHWMVCPSAEAQDPFPTVGPNSVLSPQRLVLETLCKLSIQDNNVDLILATPPFSRQEKFYATLVRYVGDRKNPVCREMSMALLSNLAQGDALAARAIAVQKGSIGNLISFLEDGVTMAQYQQSQHNLMHMQPPPLEPPSVDMMCRAAKALLAMARVDENRSEFLLHEGRLLDISISAVLNSLVASVICDVLFQIGQL

SEQ ID NO: 56 - DNA, 9833 bp, Homo sapiens
gggggcggcggcgacggcggcggcggcctgaacagtgtgcaccaccaccccctgctcccccgtcacgaactcaacatggcccataacgcgggcgccgcggccgccgccggcacccacagcgccaagagcggcggctccgaggcggctctcaaggagggtggaagcgccgccgcgctgtcctcctcctcctcctcctccgcggcggcagcggcggcatcctcttcctcctcgtcgggcccgggctcggccatggagacggggctgctccccaaccacaaactgaaaaccgttggcgaagcccccgccgcgccgccccaccagcagcaccaccaccaccaccatgcccaccaccaccaccaccatgcccaccacctccaccaccaccacgcactacagcagcagctaaaccagttccagcagcagcagcagcagcagcaacagcagcagcagcagcagcagcaacagcaacatcccatttccaacaacaacagcttgggcggcgcgggcggcggcgcgcctcagcccggccccgacatggagcagccgcaacatggaggcgccaaggacagtgctgcgggcggccaggccgaccccccgggcccgccgctgctgagcaagccgggcgacgaggacgacgcgccgcccaagatgggggagccggcgggcggccgctacgagcacccgggcttgggcgccctgggcacgcagcagccgccggtcgccgtgcccgggggcggcggcggcccggcggccgtcccggagtttaataattactatggcagcgctgcccctgcgagcggcggccccggcggccgcgctgggccttgctttgatcaacatggcggacaacaaagccccgggatggggatgatgcactccgcctccgccgccgccgccggggcccccggcagcatggaccccctgcagaactcccacgaagggtaccccaacagccagtgcaaccattatccgggctacagccggcccggcgcgggcggcggcggcggcggcggcggcggaggaggaggaggcagcggaggaggaggaggaggaggaggagcaggagcaggaggagcaggagcgggagctgtggcggcggcggccgcggcggcggcggcagcagcaggaggcggcggcggcggcggctatgggggctcgtccgcggggtacggggtgctgagctccccccggcagcagggcggcggcatgatgatgggccccgggggcggcggggccgcgagcctcagcaaggcggccgccggctcggcggcggggggcttccagcgcttcgccggccagaaccagcacccgtcgggggccaccccgaccctcaatcagctgctcacctcgcccagccccatgatgcggagctacggcggcagctaccccgagtacagcagccccagcgcgccgccgccgccgccgtcgcagccccagtcccaggcggcggcggcgggggcggcggcgggcggccagcaggcggccgcgggcatgggcttgggcaaggacatgggcgcccagtacgccgctgccagcccggcctgggcggccgcgcaacaaaggagtcacccggcgatgagccccggcacccccggaccgaccatgggcagatcccagggcagcccaatggatccaatggtgatgaagagacctcagttgtatggcatgggcagtaaccctcattctcagcctcagcagagcagtccgtacccaggaggttcctatggccctccaggcccacagcggtatccaattggcatccagggtcggactcccggggccatggccggaatgcagtaccctcagcagcagatgccacctcagtatggacagcaaggtgtgagtggttactgccagcagggccaacagccatattacagccagcagccgcagcccccgcacctcccaccccaggcgcagtatctgccgtcccagtcccagcagaggtaccagccgcagcaggacatgtctcaggaaggctatggaactagatctcaacctcctctggcccccggaaaacctaaccatgaagacttgaacttaatacagcaagaaagaccatcaagtttaccagatctgtctggctccattgatgacctccccacgggaacggaagcaactttgagctcagcagtcagtgcatccgggtccacgagcagccaaggggatcagagcaacccggcgcagtcgcctttctccccacatgcgtcccctcatctctccagcatcccggggggcccatctccctctcctgttggctctcctgtaggaagcaaccagtctcgatctggcccaatctctcctgcaagtatcccaggtagtcagatgcctccgcagccacccgggagccagtcagaatccagttcccatcccgccttgagccagtcaccaatgccacaggaaagaggttttatggcaggcacacaaagaaaccctcagatggctcagtatggacctcaacagacaggaccatccatgtcgcctcatccttctcctgggggccagatgcatgctggaatcagtagctttcagcagagtaactcaagtgggacttacggtccacagatgagccagtatggaccacaaggtaactactccagacccccagcgtatagtggggtgcccagtgcaagctacagcggcccagggcccggtatgggtatcagtgccaacaaccagatgcatggacaagggccaagccagccatgtggtgctgtgcccctgggacgaatgccatcagctgggatgcagaacagaccatttcctggaaatatgagcagcatgacccccagttctcctggcatgtctcagcagggagggccaggaatggggccgccaatgccaactgtgaaccgtaaggcacaggaggcagccgcagcagtgatgcaggctgctgcgaactcagcacaaagcaggcaaggcagtttccccggcatgaaccagagtggacttatggcttccagctctccctacagccagcccatgaacaacagctctagcctgatgaacacgcaggcgccgccctacagcatggcgcccgccatggtgaacagctcggcagcatctgtgggtcttgcagatatgatgtctcctggtgaatccaaactgcccctgcctctcaaagcagacggcaaagaagaaggcactccacagcccgagagcaagtcaaaggatagctacagctctcagggtatttctcagcccccaaccccaggcaacctgccagtcccttccccaatgtcccccagctctgctagcatctcctcatttcatggagatgaaagtgatagcattagcagcccaggctggccaaagactccatcaagccctaagtccagctcctccaccactactggggagaagatcacgaaggtgtacgagctggggaatgagccagagagaaagctctgggtcgaccgatacctcaccttcatggaagagagaggctctcctgtctcaagtctgcctgccgtgggcaagaagcccctggacctgttccgactctacgtctgcgtcaaagagatcgggggtttggcccaggttaataaaaacaagaagtggcgtgagctggcaaccaacctaaacgttggcacctcaagcagtgcagcgagctccctgaaaaagcagtatattcagtacctgtttgcctttgagtgcaagatcgaacgtggggaggagcccccgccggaagtcttcagcaccggggacaccaaaaagcagcccaagctccagccgccatctcctgctaactcgggatccttgcaaggcccacagaccccccagtcaactggcagcaattccatggcagaggttccaggtgacctgaagccacctaccccagcctccacccctcacggccagatgactccaatgcaaggtggaagaagcagtacaatcagtgtgcacgacccattctcagatgtgagtgattcatccttcccgaaacggaactccatgactccaaacgccccctaccagcagggcatgagcatgcccgatgtgatgggcaggatgccctatgagcccaacaaggacccctttgggggaatgagaaaagtgcctggaagcagcgagccctttatgacgcaaggacagatgcccaacagcagcatgcaggacatgtacaaccaaagtccctccggagcaatgtctaacctgggcatggggcagcgccagcagtttccctatggagccagttacgaccgaaggcatgaaccttatgggcagcagtatccaggccaaggccctccctcgggacagccgccgtatggagggcaccagcccggcctgtacccacagcagccgaattacaaacgccatatggacggcatgtacgggcccccagccaagcgccacgagggcgacatgtacaacatgcagtacagcagccagcagcaggagatgtacaaccagtatggaggctcctactcgggcccggaccgcaggcccatccagggccagtacccgtatccctacagcagggagaggatgcagggcccggggcagatccagacacacggaatcccgcctcagatgatgggcggcccgctgcagtcgtcctccagtgaggggcctcagcagaatatgtgggcagcacgcaatgatatgccttatccctaccagaacaggcagggccctggcggccctacacaggcgcccccttacccaggcatgaaccgcacagacgatatgatggtacccgatcagaggataaatcatgagagccagtggccttctcacgtcagccagcgtcagccttatatgtcgtcctcagcctccatgcagcccatcacacgcccaccacagccgtcctaccagacgccaccgtcactgccaaatcacatctccagggcgcccagcccagcgtccttccagcgctccctggagaaccgcatgtctccaagcaagtctccttttctgccgtctatgaagatgcagaaggtcatgcccacggtccccacatcccaggtcaccgggccaccaccccaaccacccccaatcagaagggagatcacctttcctcctggctcagtagaagcatcacaaccagtcttgaaacaaaggcgaaagattacctccaaagatatcgttactcctgaggcgtggcgtgtgatgatgtcccttaaatcaggtcttttggctgagagtacgtgggctttggacactattaatattcttctgtatgatgacagcactgttgctactttcaatctctcccagttgtctggatttctcgaacttttagtcgagtactttagaaaatgcctgattgacatttttggaattcttatggaatatgaagtgggagaccccagccaaaaagcacttgatcacaacgcagcaaggaaggatgacagccagtccttggcagacgattctgggaaagaggaggaagatgctgaatgtattgatgacgacgaggaagacgaggaggatgaggaggaagacagcgagaagacagaaagcgatgaaaagagcagcatcgctctgactgccccggacgccgctgcagacccaaaggagaagcccaagcaagccagtaagttcgacaagctgccaataaagatagtcaaaaagaacaacctgtttgttgttgaccgatctgacaagttggggcgtgtgcaggagttcaatagtggccttctgcactggcagctcggcgggggtgacaccaccgagcacattcagactcactttgagagcaagatggaaattcctcctcgcaggcgcccacctccccccttaagctccgcaggtagaaagaaagagcaagaaggcaaaggcgactctgaagagcagcaagagaaaagcatcatagcaaccatcgatgacgtcctctctgctcggccaggggcattgcctgaagacgcaaaccctgggccccagaccgaaagcagtaagtttccctttggtatccagcaagccaaaagtcaccggaacatcaagctgctggaggacgagcccaggagccgagacgagactcctctgtgtaccatcgcgcactggcaggactcgctggctaagcgatgcatctgtgtgtccaatattgtccgtagcttgtcattcgtgcctggcaatgatgccgaaatgtccaaacatccaggcctggtgctgatcctggggaagctgattcttcttcaccacgagcatccagagagaaagcgagcaccgcagacctatgagaaagaggaggatgaggacaagggggtggcctgcagcaaagatgagtggtggtgggactgcctcgaggtcttgagggataacacgttggtcacgttggccaacatttccgggcagctagacttgtctgcttacacggaaagcatctgcttgccaattttggatggcttgctgcactggatggtgtgcccgtctgcagaggcacaagatccctttccaactgtgggacccaactcggtcctgtcgcctcagagacttgtgctggagaccctctgtaaactcagtatccaggacaataatgtggacctgatcttggccactcctccatttagtcgtcaggagaaattctatgctacattagttaggtacgttggggatcgcaaaaacccagtctgtcgagaaatgtccatggcgcttttatcgaaccttgcccaaggggacgcactagcagcaagggccatagctgtgcagaaaggaagcattggaaacttgataagcttcctagaggatggggtcacgatggcccagtaccagcagagccagcacaacctcatgcacatgcagcccccgcccctggaaccacctagcgtagacatgatgtgcagggcggccaaggctttgctagccatggccagagtggacgaaaaccgctcggaattccttttgcacgagggccggttgctggatatctcgatatcagctgtcctgaactctctggttgcatctgtcatctgtgatgtactgtttcagattgggcagttatgacataagtgagaaggcaagcatgtgtgagtgaagattagagggtcacatataactggctgttttctgttcttgtttatccagcgtaggaagaaggaaaagaaaatctttgctcctctgccccattcactatttaccaattgggaattaaagaaataattaatttgaacagttatgaaattaatatttgctgtctgtgtgtataagtacatcctttggggttttttttttctcttttttttaaccaaagttgctgtctagtgcattcaaaggtcactttttgttcttcacagatctttttaatgttctttcccatgttgtattgcatttttgggggaagcaaattgactttaaagaaaaaagttgtggcaaaagatgctaagatgcgaaaatttcaccacactgagtcaaaaaggtgaaaaattatccatttcctatgcgttttactcctcagagaatgaaaaaaactgcatcccatcacccaaagttctgtgcaatagaaatttctacagatacaggtataggggctcaaggaggtatgtcggtcagtagtcaaaactatgaaatgatactggtttctccacaggaatatggttccattaggctgggagcaaaaacaatgttttttaagattgagaatacatacctgacaacgatccggaaactgctcctcaccactcccgtcatgcctgctgtcggcgtttgaccttccacgtgacagttcttcacaattcctttcatcattttttaaatattttttttactgcctatgggctgtgatgtatatagaagttgtacattaaacataccctcatttttttcttttcttttttttttttttttttagtacaaagttttagtttctttttcatgatgtggtaactacgaagtgatggtagatttaaataattttttatttttattttatatattttttcattagggccatatctccaaaaaaagaaagaaaaaatacaaaaaacaaaaacaaaaaaaaaagagggtaatgtacaagtttctgtatgtataaagtcatgctcgatttcaggagagcagctgatcacaatttgcttcatgaatcaaggtgtggaaatggttatatatggattgatttagaaaatggttaccagtacagtcaaaaaagagaaaatgaaaaaaatacaactaaaaggaagaaacacaacttcaaagatttttcagtgatgagaatccacatttgtatttcaagataatgtagtttaaaaaaaaaaaaaagaaaaaaacttgatgtaaattcctccttttcctctggcttaatgaatatcatttattcagtataaaatctttatatgttccacatgttaagaataaatgtacattaaatcttgttaagcactgtgatgggtgttcttgaatactgttctagtttccttaaagtggtttcctagtaatcaagttatttacaagaaataggggaatgcagcagtgtattcacattataaaaccctacatttggaagagacctttaggggttacctactttagagtggggagcaacagtttgattttctcaaattacttagctaattagtctttctttgaagcaattaactctaacgacattgaggtatgatcattttcagtatttatgggaggtggctgctgacccacttgaggtgagatctcagaagcttaactggcctgaaaatgtaacattctgccttttactaactccatcttagtttaatcaaagttcaatctattccttgtttcttctgtgtgcctcagagttattttgcatttagtttactccaccgtgtataatatttatactgtgcaatgttaaaaaagaatctgttatattgtatgtggtgtacatagtgcaaagtgatgatttctatttcagggcatattatggttctcatattccttcctacctggtgcacagtagctttttaatactagtcacttctaatttaaactttctcttcctgggtcattgactgttactgtgtaataatcgatttctttgaaactgctgcataattatgctgttagtggacctctacctcttctcttccctctcccaatcacagtatactcagaatccccagcccctcgcatacattgtgtcggttcacattactcacagtaatatatggaagagttagacaagaacatgcagttacagtcattgtgagacgtgactctccagtgtcacgaggaaaaaaatcatcttttctgcaaacagtctctcatctgtcaactcccacattactgagtcaaacagtcttcttacataacaatgcaaccaaatatatgttgaattaaagacccatttataattctgctttaaatacatctgcttgctaagaacagatttcagtgctccaagcttcaaatatggagatttgtaagagggaattcaatattattctaatttctctcttacagagtacaaataaaaggtgtatacaaactccgaacatatccagtattccaattcctttgtcaatcagaagagtaaaataattaacaaaagactgttgttatggtttgcattgtaaccgatacgcagagtctgaccgttgggcaacaagtttttctatcctgatgcgcaacacagtctctagagactaatccaggaagactttagcctcctttccatattctcacccccgaatcaagatttacagaagcccacgaagaatttacagcctgcttgagatcatcttgcctataaactgagttattgctttgtcctaaaaattagtcggtttttttttttctatgaggcttttcagaaatttacaggatgcccagactttacatgtgtaccaaaaaaaaaaaaaagataaaaaataaaggtgcaaagaaagtttagtattttggaatggtgctataaagttgaa

SEQ ID NO: 57 - protein, 2289 aa, Homo sapiens
MAHNAGAAAAAGTHSAKSGGSEAALKEGGSAAALSSSSSSSAAAAAASSSSSSGPGSAMETGLLPNHKLKTVGEAPAAPPHQQHHHHHHAHHHHHHAHHLHHHHALQQQLNQFQQQQQQQQQQQQQQQQQQHPISNNNSLGGAGGGAPQPGPDMEQPQHGGAKDSAAGGQADPPGPPLLSKPGDEDDAPPKMGEPAGGRYEHPGLGALGTQQPPVAVPGGGGGPAAVPEFNNYYGSAAPASGGPGGRAGPCFDQHGGQQSPGMGMMHSASAAAAGAPGSMDPLQNSHEGYPNSQCNHYPGYSRPGAGGGGGGGGGGGGGSGGGGGGGGAGAGGAGAGAVAAAAAAAAAAAGGGGGGGYGGSSAGYGVLSSPRQQGGGMMMGPGGGGAASLSKAAAGSAAGGFQRFAGQNQHPSGATPTLNQLLTSPSPMMRSYGGSYPEYSSPSAPPPPPSQPQSQAAAAGAAAGGQQAAAGMGLGKDMGAQYAAASPAWAAAQQRSHPAMSPGTPGPTMGRSQGSPMDPMVMKRPQLYGMGSNPHSQPQQSSPYPGGSYGPPGPQRYPIGIQGRTPGAMAGMQYPQQQMPPQYGQQGVSGYCQQGQQPYYSQQPQPPHLPPQAQYLPSQSQQRYQPQQDMSQEGYGTRSQPPLAPGKPNHEDLNLIQQERPSSLPDLSGSIDDLPTGTEATLSSAVSASGSTSSQGDQSNPAQSPFSPHASPHLSSIPGGPSPSPVGSPVGSNQSRSGPISPASIPGSQMPPQPPGSQSESSSHPALSQSPMPQERGFMAGTQRNPQMAQYGPQQTGPSMSPHPSPGGQMHAGISSFQQSNSSGTYGPQMSQYGPQGNYSRPPAYSGVPSASYSGPGPGMGISANNQMHGQGPSQPCGAVPLGRMPSAGMQNRPFPGNMSSMTPSSPGMSQQGGPGMGPPMPTVNRKAQEAAAAVMQAAANSAQSRQGSFPGMNQSGLMASSSPYSQPMNNSSSLMNTQAPPYSMAPAMVNSSAASVGLADMMSPGESKLPLPLKADGKEEGTPQPESKSKDSYSSQGISQPPTPGNLPVPSPMSPSSASISSFHGDESDSISSPGWPKTPSSPKSSSSTTTGEKITKVYELGNEPERKLWVDRYLTFMEERGSPVSSLPAVGKKPLDLFRLYVCVKEIGGLAQVNKNKKWRELATNLNVGTSSSAASSLKKQYIQYLFAFECKIERGEEPPPEVFSTGDTKKQPKLQPPSPANSGSLQGPQTPQSTGSNSMAEVPGDLKPPTPASTPHGQMTPMQGGRSSTISVHDPFSDVSDSSFPKRNSMTPNAPYQQGMSMPDVMGRMPYEPNKDPFGGMRKVPGSSEPFMTQGQMPNSSMQDMYNQSPSGAMSNLGMGQRQQFPYGASYDRRHEPYGQQYPGQGPPSGQPPYGGHQPGLYPQQPNYKRHMDGMYGPPAKRHEGDMYNMQYSSQQQEMYNQYGGSYSGPDRRPIQGQYPYPYSRERMQGPGQIQTHGIPPQMMGGPLQSSSSEGPQQNMWAARNDMPYPYQNRQGPGGPTQAPPYPGMNRTDDMMVPDQRINHESQWPSHVSQRQPYMSSSASMQPITRPPQPSYQTPPSLPNHISRAPSPASFQRSLENRMSPSKSPFLPSMKMQKVMPTVPTSQVTGPPPQPPPIRREITFPPGSVEASQPVLKQRRKITSKDIVTPEAWRVMMSLKSGLLAESTWALDTINILLYDDSTVATFNLSQLSGFLELLVEYFRKCLIDIFGILMEYEVGDPSQKALDHNAARKDDSQSLADDSGKEEEDAECIDDDEEDEEDEEEDSEKTESDEKSSIALTAPDAAADPKEKPKQASKFDKLPIKIVKKNNLFVVDRSDKLGRVQEFNSGLLHWQLGGGDTTEHIQTHFESKMEIPPRRRPPPPLSSAGRKKEQEGKGDSEEQQEKSIIATIDDVLSARPGALPEDANPGPQTESSKFPFGIQQAKSHRNIKLLEDEPRSRDETPLCTIAHWQDSLAKRCICVSNIVRSLSFVPGNDAEMSKHPGLVLILGKLILLHHEHPERKRAPQTYEKEEDEDKGVACSKDEWWWDCLEVLRDNTLVTLANISGQLDLSAYTESICLPILDGLLHWMVCPSAEAQDPFPTVGPNSVLSPQRLVLETLCKLSIQDNNVDLILATPPFSRQEKFYATLVRYVGDRKNPVCREMSMALLSNLAQGDALAARAIAVQKGSIGNLISFLEDGVTMAQYQQSQHNLMHMQPPPLEPPSVDMMCRAAKALLAMARVDENRSEFLLHEGRLLDISISAVLNSLVASVICDVLFQIGQL

SEQ ID NO: 58 - DNA, 11325 bp, Mus musculus
tcggcgggccccggctcgaccatggagaccgggctgctccccaaccacaaactgaaagccgttggcgaggcccccgctgcaccgccccatcagcagcaccaccaccaccatgcccaccaccaccaccaccaccatgcccaccacctccaccacctccaccaccaccacgcactacagcagcagctaaaccagttccagcagccgcagccgccgcagccacagcagcagcagccgccgccaccgccgcagcagcagcatcccactgccaacaacagcctgggcggtgcgggcggcggcgcgcctcagcccggcccggacatggagcagccgcaacatggaggcgccaaggacagtgtcgcgggcaatcaggctgacccgcagggccagcctctgctgagcaaaccgggcgacgaggacgacgcgccgcccaagatgggggagccggcgggcagccgctatgagcacccgggcctgggcgcgcagcagcagcccgcgccggtcgccgtgcccgggggcggcggcggcccagcggccgtctcggagtttaataattactatggcagcgctgcccctgctagcggcggccccggcggccgcgctgggccttgctttgatcaacatggcggacaacaaagccccgggatggggatgatgcactccgcctctgccgccgccggggcccccagcagcatggaccccctgcagaactcccacgaagggtaccccaacagccagtacaaccattatccgggctacagccggcccggcgcgggcggcggcggcggcggcggcggaggaggaggaggcagcggaggaggtggaggaggaggaggagcaggaggagcaggaggagcagcggcagcggcagcaggagccggagctgtggcggcggcggccgcggcggcggcggcagcagcagcagcagcaggaggaggcggtggcggcggctatgggagctcgtcctcggggtacggggtgctgagctccccgcggcagcagggcggcggcatgatgatgggccccgggggcggcggggccgcgagcctcagcaaggcggccgccggcgcggcggcggcggcggggggcttccagcgcttcgccggccagaaccagcacccgtcgggggctacaccgaccctcaaccagctgctcacctcacccagccccatgatgaggagctacggcggtagctaccccgactacagcagctccagcgcgccgccgccgccgtcgcagccccagtcccaggcggcggcgggggcggcggcgggtggccagcaggcggccgcgggcatgggcttgggcaaggacctaggcgcccagtacgccgctgccagcccggcctgggcggccgcgcaacaaaggagtcacccggcgatgagccccggcacccccggaccgaccatgggcagatcccagggcagcccgatggacccaatggtgatgaagagacctcagttgtatgggatgggtactcacccccactcccagccacagcagagcagcccatacccaggaggctcctacggtcccccaggtgcacagcggtatccccttggcatgcagggccgggctccaggggccctgggaggcttgcagtacccgcagcagcagatgccaccgcagtacggacagcaagctgtgagtggctactgccagcaaggccagcagccatactacaaccagcagccgcagccctcgcacctcccgccccaggcacagtacctgcagccggcggcggcgcagtcccagcagaggtaccagccacagcaggacatgtctcaagaaggctatggaactagatctcagcctcctctggcccctggaaaatccaaccatgaagacttgaatttaattcaacaggaaagaccatcgagtctaccagacctgtctggctccatcgatgacctccccacgggaacagaagcaactctgagctcagcagtcagtgcatccgggtctacaagcagccagggagatcagagcaacccagcgcagtctcctttctccccacatgcatcacctcacctctccagcatccctggagggccgtcaccttctcctgttggctctcctgtgggaagcaaccaatcgaggtctggtccgatctcccctgcgagtattccaggtagccagatgcctccgcaaccacctggaagccagtcagaatccagttcccatcctgccttgagccagtcaccaatgccacaggaaagaggttttatgacaggcactcagagaaaccctcagatgtctcagtacggacctcagcagacaggaccatccatgtcgcctcacccatctcctgggggccagatgcatcctgggatcagtaactttcagcagagtaactcaagtggcacgtacggcccacagatgagccagtatggaccccaaggcaactactccagaaccccaacatatagcggggtacccagtgcaagctacagcggcccagggcccggtatgggcatcaatgccaacaaccagatgcatggacaagggccagcccagccatgtggtgctatgcccctgggacgaatgccttcagctgggatgcagaacagaccatttcctggaaccatgagcagcgtcacccccagttctcctggcatgtctcaacagggagggccaggaatgggcccaccaatgcccactgtgaaccggaaggcccaggaagctgccgcagctgtgatgcaggctgctgcaaactcagcacaaagcaggcaaggcagttttcctggcatgaaccagagtggcctggtggcctccagctctccctacagccagtccatgaacaacaactccagcctgatgagcacccaggcccagccctacagcatgacgcccacaatggtgaacagctccacagcatctatgggtcttgcagatatgatgtctcccagtgagtccaaattgtctgtgcctcttaaagcagatggtaaagaagaaggcgtgtcccagcctgagagcaagtcaaaggacagctatggctctcagggcatttcccagcctccaaccccaggcaacctgcctgtcccttccccaatgtctcccagctctgccagcatctcctcctttcatggagatgagagtgacagcattagcagcccaggctggcccaagacaccatcaagccctaagtccagctcttcctccaccactggggagaagatcacgaaggtctatgagctggggaatgagccggagaggaagctgtgggtcgaccgttacctaacgttcatggaagagaggggctccccggtgtccagtctgccagcagtgggcaagaagcccctggacctgttccgactgtatgtctgcgtcaaggagattggaggtttggcgcaggttaataaaaacaagaagtggcgtgagctggcaaccaacctgaacgttggcacttccagcagcgcagccagctctctgaaaaagcagtatattcagtacctgttcgcctttgagtgcaaaactgagcgcggggaggagcccccacctgaagtcttcagcaccggggattcgaagaagcagccaaagctccagccgccatctcctgctaactcaggatccttacaaggcccacagactccacagtcaactgggagcaattcgatggcagaggttccaggtgacctgaagccaccaaccccagcctctacccctcatggacagatgactcccatgcaaagcggaagaagcagtacagtcagtgtgcatgacccgttctcagacgtgagtgactcagcgtacccaaaacggaactccatgactccaaacgccccataccagcagggcatgggcatgccagacatgatgggcaggatgccctatgaacccaacaaggaccctttcagtggaatgagaaaagtgcctggaagtagtgagccctttatgacacaaggacaggtgcccaacagcggcatgcaggacatgtacaaccagagcccctcaggggccatgtccaatctgggcatgggacagcggcagcagtttccctatggaaccagttatgaccgaaggcatgaggcttacggacagcagtacccaggccaaggccctcccacaggacagccaccgtatggaggacaccagcctggcctgtacccacagcagccgaattacaaacgtcatatggatggcatgtacgggcctccagccaagcggcacgagggagacatgtacaacatgcagtatggcagccagcagcaggagatgtataaccagtatggaggctcctactctggcccggacagaaggcccatccagggacaatatccctacccctacaacagagaaaggatgcagggcccaggccagatgcagccacacggaatcccacctcagatgatggggggccccatgcagtcatcctccagcgaggggcctcagcagaacatgtgggctacacgcaacgatatgccttatccctaccagagcaggcaaggcccgggcggccctgcacaggcccccccttacccaggcatgaaccgcacagatgatatgatggtacctgagcagaggatcaatcacgagagccagtggccttctcacgtcagccagcgccagccttacatgtcatcttcggcctccatgcagcccatcacgcgcccacctcagtcatcctaccagacgccgccgtcactgccaaaccacatctccagggcacccagccccgcctccttccagcgctccctggagagtcgcatgtctccaagcaagtctcccttcctgcccaccatgaagatgcagaaggtcatgcccacagtccccacatcccaggtcaccgggccccccccacagcctccaccaatcagaagggagattacctttcctcctggctccgtagaagcatcacagccaatcctgaaacaaaggcgaaagattacctcaaaagatattgttactcccgaggcgtggcgtgtgatgatgtcccttaaatcgggtctgttggctgagagcacgtgggctctggacaccatcaatattctcctctatgatgacagcaccgtcgccaccttcaatctttcccagctgtctggattcctggaactattagtagagtactttcgaaaatgcctaattgacattttcggaattcttatggaatatgaagtgggtgaccccagccaaaaggctcttgatcaccgttcagggaagaaagatgacagccagtccctggaagatgattctgggaaggaagacgatgatgctgagtgtcttgtggaagaggaggaggaggaagaggaggaggaggaagacagtgaaaagatagagtcagaggggaagagcagccctgccctagctgctccagatgcctccgtggaccccaaggagacgccaaagcaggccagtaagtttgacaagctgcccataaagattgtcaaaaagaacaagctgtttgtggtggaccggtccgacaagctgggccgagtgcaggagttcagcagcgggctcctccactggcagctgggtggtggcgacactaccgagcacatccagactcacttcgagagcaagatggagatccctcctcgcaggcgtccacctccgcctctaagctccacgggtaagaagaaagagctggaaggcaaaggtgattctgaagagcagccagagaaaagtatcatagccaccatcgatgacgtcttgtctgcccggccaggggctctgcctgaagacaccaacccaggaccccagaccgacagcggcaagtttccctttggaatccagcaggccaaaagccaccggaacatcaggctcctggaagacgagcccaggagccgagacgagacgccgctgtgcaccatcgcgcactggcaggactcactggccaagcgctgcatctgtgtgtcgaacatcgtgcggagcttgtctttcgtgcctggcaacgacgcagagatgtccaaacacccgggcttggtgctgatcctgggaaagctgattctgctgcatcacgagcatccggagagaaagcgggcgccacagacctatgagaaggaggaggacgaggacaagggggtggcctgcagcaaagatgagtggtggtgggactgcctcgaggtcttgcgggataacaccctggtcacgttggcgaacatttccgggcagctagacttgtctgcttacacagagagcatctgcttgccgatcctggacggcttgctacactggatggtgtgcccgtccgcagaggctcaggacccctttcccactgtggggcccaactcagtcctgtcgccgcagagacttgtgctggagaccctgtgtaaactcagtatccaggacaacaacgtggacctgatcttggccacgcctccatttagtcgtcaggagaaattttatgctacattagttaggtacgttggggatcgcaaaaatccagtctgtcgagaaatgtccatggcgcttttatcgaaccttgcccagggggacacactggcggcgagggcaatagctgtgcagaaaggaagcattggtaacttgataagcttcctagaggacggggtgacgatggcgcagtaccagcagagccagcataaccttatgcacatgcagcccccacctctggaaccccctagtgtagacatgatgtgccgggcggccaaagctctgctggccatggccagagtggacgagaaccgctcggagttccttttgcacgagggtcggttgctggatatctcaatatcagctgtcctgaactctctggttgcatctgtcatctgtgatgtactgtttcagattgggcagttatgacatccgtgaaggcacacatgtgtgagtgaacattagagggtcacatataactggctgttttctgttctcgtttatccagtgtaagaagaaggaaaagaaaaatctttgctcctctgccccgtttactatttaccaattgggaattaaatcattaatttgaacagttataaaattaatatttgctgtctgtgtgtataagtacatcctctggcggttttctgtttcttttttttttaaccaaagttgccgtctagtgcattcaaaggtcacaatttttgtttgtttgtttgtttgtttgttttttcataatttttttcatgttgtattgcagtctttgggaagtgaattgactttataaagaaaaacgttttggcaaaaagtgctaagatagaaaaatgtcaccacactgggtcaaaaacgtgaaaggaaaaattgattcttaaattgatttcctatgaattttattcttcacagaatgataaaagctaaactgcaccccgtcacccaaagctctgtgcaatagaaacttctagagatatagtgtaggggctgaaggaggtatggcagcagtagtcagggtcaatgatactgctttctccaccggaaagtggttacgttaggcctcgagcaaaaaacagcgctctcagataggtgcaaaaatccactcctagcagccaacagcaggatcgcttcctcaccacgaccgccatgtctgctgtggctcagcctccacgggacaaagcttcaagatttctttcatcatttttttaaatattttttttactgcctatgggctgtgatgtatatagaagttgtacattaaacataccctcatttttttcttcttttctttttttctttttttctttttctttttttttttttttagtacaaagtttttagtttctttttcatgatgtggtaactacgaagtgatggtagatttaaataattttttatttttattttatatattttttcattaggaccatatctccaaaaaacaagaaaaagaaacaaaaaatacaaaaaataaaaacaaacaaaaaaagagggtaatgtacaagtttctgtatgtataaagtcatgctctgttgggagagcggctgatcccagtttgcttcatgaatcaaagtgtggaaatggttgcatacagattgatttagaaaatggacaccagtacatacaaaaaaagaaaaaagaaagaaaaccaactaaatggaagaaacacaacttcaaagatttttctgtgacaagaatccacatttgtatttcaagataatgtagtttaagaaaagaaaaaaaagaaaaaaaaagaaaaaaacttgatgtaaattcctccttttcctctggcttaatgaatatcatttattcagtataaaatctttatatgtcccacatgttaagaataaatgtacattaaatcttgttacgcactgtgatgggtgttcttgaatgctgttctagtttgcctagcatggttgccatagtaaccaagttatttacaggaaatagggaagatgtaacaactgcttcctggtaatgatgcccaaaggccagaagggactttcagggtttcctacttgagagtgggagcaacaatttgattttctcagattgtttagctaattaggtcttctttgaagcaattaactctggtgacattgagaagtggtaattccctcatggatgggtggtggctgccaacccactgtgacatggggccctgcaagctaactggcctgaaaccacgaccttctgcctctcactactgatttaacccaagtctgcacccgtcatgtttcttctgtgtgcctccaagttactctgcgttagtttgctccagcgtgtataatatttatattgtgcaatgttaaagagaacgtgtcatattgtatgccgtgtgtatagtgccaagtgatgattctgtttcagagcataccttccttcctgcccagtccctggctctctaataccccaccctgatggaaagtgcttcttcctgggtaattgactgttactgtgtaacgctcagtctcattgaaacttacataaccatgctgctggtgccccttcctaccctacctctctcagcactcttcagttgacacttcccacacctgtcactgtggcccaccttgctcacgctgacatctggaagagttagacaggagcacacacttacaacactaggagatgttattctggtgtcacgagaaagaaattggtttttcctgcaaacagtcccatcaccaagcagcccccacatcaggtcagcaaaaagatctgtgttgaatcaaaactccatttataattctactagatgggaatacatctgcttacaaaggacagattttagtgttctgtgatgaaaatatggagagtgcaagagagagttcaatggaatcctaatcttgctcttgcagacaatgaatgaaaggtatagacaggctcagttccctgtcagaagagtggtctcaaagacaagtggctgtatagcagccaggcccagaacagcctcgcagcacacactaacaccaagcgggtgtctgagctctcctaggaagccttgtgcctgccctccctccattcacccagatccgactcctggaagcccacgaaagagtcaccctttgcttcacatttcctgacgataccgagttgctgctctgtcctaaaaatattagttcttttccagggctttcagaaatttgcaggatgcccatactctaaatgtgtaccaaaaagagagagaaataaaggtgcgaagaaagtttagtattttggaatggtgcgataaaatggaatctgttggtttttaatgtaacataagatactattggctggcactggctaaaaaaaatatctaagtgttggagttggatgcacaatcaacttttacttagctattcaaagagtacttatgttttccaagttaaaacagacttgtttttgacaggggccgtgggtggtcttatacaatgccagctcctaactgcagcttctgagaactggatatcgtttgccctgagagctgcccgtctccaactatgtgctgctgctgccctgtgtgctcagcccacaaggatgtggagactggatagacaaccccttgcttcttgctgggttgtgctgagttctttgcagtccagtcaagtgcccagagctaccagcctacgtccctcatgcatccaagagaaatgatcttgactatcatgatcaaaacagctgtagtaatatttctagtaaatatttctgatgactctgtgtaatctcctacaacaggacactattcattaacttgacagagacatgtgggcatgtggtcctgctttagtttaacagacaagtcaaccagttctcattacttaggaagagtgaggctatgtctgttacaatcccaatgtggtgcttgcccttatccaaagacagtccgggggccctgtctgcctgaactatgtctcgctccctcttgggcttcccactgggatgtgaaaagataaccaatggctcccaggttcccagtgccccccaaaccagtaatcaggtctgggactacagaacccgcaaaatcatacacaggctgtttcaaagccagtactctctttatactcctgcttcctccagcccccatttcacaccccacccaaatcacaaggtcctctgaagtctcagaactccaaattaacgttgggatttacgatgtgaatgctgaggagaaaattgggagttggtgggagatcaccaaattgtcaaaactatgaaactcatctgtcttcccaaatctgacctcagggacttggggggttcactctggcttctgccacagtattttctggggaaccaaaggcctcgggaatagagaaacaggttgccggatatcctggaagtctaagccatactgaccagtttgtcttgagtgttttctttgtgagcctggaactgtccccggacccctttcttttaaacatggttcaggactttaaaaaaaagcactgtattttttttatgtaagccaagatgccctccctagcagagatagcgttgaactgtctctagttctgtagcctgagagacttaaatcgtttaacttcagtgtctttgtccactctgttgaactgctaaggattctattgaatgtgttctttgcggctttggaggagttgctgggtgtgtaagtcctgcatccctttgcctggtatgtgtatattattcctttgcctggctgtgtatcgttcttcagtgtaagtacacccacactctgtattcctttgcctgctccccgcccccccacacacacacatcctgcatagttttaaaataaggcctgagagactgtttctatttcctgtcatagctggtgacttttaacagttgaggcgaatggcctgtcacttgcctgggttcccgtcaggggtgatccatggaactcctcagtggaacagaatttaggacagaagatcccaccttccttccaggcctggggagaatcagactgtgagataaaccatgatgctgcccaatcccactgccccaccttgcttttaaaataaagtgcctcctaacgtc

SEQ ID NO: 59 - protein, 2244 aa, Mus musculus
METGLLPNHKLKAVGEAPAAPPHQQHHHHHAHHHHHHHAHHLHHLHHHHALQQQLNQFQQPQPPQPQQQQPPPPPQQQHPTANNSLGGAGGGAPQPGPDMEQPQHGGAKDSVAGNQADPQGQPLLSKPGDEDDAPPKMGEPAGSRYEHPGLGAQQQPAPVAVPGGGGGPAAVSEFNNYYGSAAPASGGPGGRAGPCFDQHGGQQSPGMGMMHSASAAAGAPSSMDPLQNSHEGYPNSQYNHYPGYSRPGAGGGGGGGGGGGGSGGGGGGGGAGGAGGAAAAAAGAGAVAAAAAAAAAAAAAAGGGGGGGYGSSSSGYGVLSSPRQQGGGMMMGPGGGGAASLSKAAAGAAAAAGGFQRFAGQNQHPSGATPTLNQLLTSPSPMMRSYGGSYPDYSSSSAPPPPSQPQSQAAAGAAAGGQQAAAGMGLGKDLGAQYAAASPAWAAAQQRSHPAMSPGTPGPTMGRSQGSPMDPMVMKRPQLYGMGTHPHSQPQQSSPYPGGSYGPPGAQRYPLGMQGRAPGALGGLQYPQQQMPPQYGQQAVSGYCQQGQQPYYNQQPQPSHLPPQAQYLQPAAAQSQQRYQPQQDMSQEGYGTRSQPPLAPGKSNHEDLNLIQQERPSSLPDLSGSIDDLPTGTEATLSSAVSASGSTSSQGDQSNPAQSPFSPHASPHLSSIPGGPSPSPVGSPVGSNQSRSGPISPASIPGSQMPPQPPGSQSESSSHPALSQSPMPQERGFMTGTQRNPQMSQYGPQQTGPSMSPHPSPGGQMHPGISNFQQSNSSGTYGPQMSQYGPQGNYSRTPTYSGVPSASYSGPGPGMGINANNQMHGQGPAQPCGAMPLGRMPSAGMQNRPFPGTMSSVTPSSPGMSQQGGPGMGPPMPTVNRKAQEAAAAVMQAAANSAQSRQGSFPGMNQSGLVASSSPYSQSMNNNSSLMSTQAQPYSMTPTMVNSSTASMGLADMMSPSESKLSVPLKADGKEEGVSQPESKSKDSYGSQGISQPPTPGNLPVPSPMSPSSASISSFHGDESDSISSPGWPKTPSSPKSSSSSTTGEKITKVYELGNEPERKLWVDRYLTFMEERGSPVSSLPAVGKKPLDLFRLYVCVKEIGGLAQVNKNKKWRELATNLNVGTSSSAASSLKKQYIQYLFAFECKTERGEEPPPEVFSTGDSKKQPKLQPPSPANSGSLQGPQTPQSTGSNSMAEVPGDLKPPTPASTPHGQMTPMQSGRSSTVSVHDPFSDVSDSAYPKRNSMTPNAPYQQGMGMPDMMGRMPYEPNKDPFSGMRKVPGSSEPFMTQGQVPNSGMQDMYNQSPSGAMSNLGMGQRQQFPYGTSYDRRHEAYGQQYPGQGPPTGQPPYGGHQPGLYPQQPNYKRHMDGMYGPPAKRHEGDMYNMQYGSQQQEMYNQYGGSYSGPDRRPIQGQYPYPYNRERMQGPGQMQPHGIPPQMMGGPMQSSSSEGPQQNMWATRNDMPYPYQSRQGPGGPAQAPPYPGMNRTDDMMVPEQRINHESQWPSHVSQRQPYMSSSASMQPITRPPQSSYQTPPSLPNHISRAPSPASFQRSLESRMSPSKSPFLPTMKMQKVMPTVPTSQVTGPPPQPPPIRREITFPPGSVEASQPILKQRRKITSKDIVTPEAWRVMMSLKSGLLAESTWALDTINILLYDDSTVATFNLSQLSGFLELLVEYFRKCLIDIFGILMEYEVGDPSQKALDHRSGKKDDSQSLEDDSGKEDDDAECLVEEEEEEEEEEEDSEKIESEGKSSPALAAPDASVDPKETPKQASKFDKLPIKIVKKNKLFVVDRSDKLGRVQEFSSGLLHWQLGGGDTTEHIQTHFESKMEIPPRRRPPPPLSSTGKKKELEGKGDSEEQPEKSIIATIDDVLSARPGALPEDTNPGPQTDSGKFPFGIQQAKSHRNIRLLEDEPRSRDETPLCTIAHWQDSLAKRCICVSNIVRSLSFVPGNDAEMSKHPGLVLILGKLILLHHEHPERKRAPQTYEKEEDEDKGVACSKDEWWWDCLEVLRDNTLVTLANISGQLDLSAYTESICLPILDGLLHWMVCPSAEAQDPFPTVGPNSVLSPQRLVLETLCKLSIQDNNVDLILATPPFSRQEKFYATLVRYVGDRKNPVCREMSMALLSNLAQGDTLAARAIAVQKGSIGNLISFLEDGVTMAQYQQSQHNLMHMQPPPLEPPSVDMMCRAAKALLAMARVDENRSEFLLHEGRLLDISISAVLNSLVASVICDVLFQIGQL

SEQ ID NO: 60 - DNA, 5780 bp, Homo sapiens
ctgggcggggccgggaagcggcagtggcggctacgcgcgcgggggtgcgcgcgggaacgaccgggaaacaccgcgagggccggggtgggccaggctgtggggacgacgggctgcgacgatggccgcagcggcgggcggcggcgggccggggacagcggtaggcgccacgggctcggggattgcggcggcagccgcaggcctagctgtttatcgacggaaggatgggggcccggccaccaagttttgggagagcccggagacggtgtcccagctggattcggtgcgggtctggctgggcaagcactacaagaagtatgttcatgcggatgctcctaccaataaaacactggctgggctggtggtgcagcttcttcagttccaggaagatgcctttgggaagcatgtcaccaacccggccttcaccaaactccctgcaaagtgtttcatggatttcaaagctggaggcgccttatgtcacattcttggggctgcttacaagtataaaaatgaacagggatggcggaggtttgacctacagaacccatctcgaatggatcgtaatgtggaaatgtttatgaacattgaaaaaacattggtgcagaacaattgtttgaccagacccaacatctacctcattccagacattgatctgaagttggctaacaaattgaaagatatcatcaaacgacatcagggaacatttacggatgagaagtcaaaagcttcccaccacatttacccatattcttcctcacaagacgatgaagaatggttgagaccggtgatgagaaaagagaagcaagtgttagtgcattggggcttttacccagacagctatgatacttgggtccatagtaatgatgttgatgctgaaattgaagatccaccaattccagaaaaaccatggaaggttcatgtgaaatggattttggacactgatattttcaatgaatggatgaatgaggaggattatgaggtggatgaaaataggaagcctgtgagttttcgtcagcggatttcaaccaagaatgaagagccagtcagaagtccagaaagaagagatagaaaagcatcagctaatgctcgaaagaggaaacattcgccttcgcctccccctccgacaccaacagaatcacggaagaagagtgggaagaaaggccaagctagcctttatgggaagcgcagaagtcagaaagaggaagatgagcaagaagatctaaccaaggatatggaagacccaacacctgtacccaatatagaagaagtagtacttcccaaaaatgtgaacctaaagaaagatagtgaaaatacacctgttaaaggaggaactgtagcggatctagatgagcaggatgaagaaacagtcacagcaggaggaaaggaagatgaagatcctgccaaaggtgatcagagtcgatcagttgaccttggggaagataatgtgacagagcagaccaatcacattattattcctagttatgcatcatggtttgattataactgtattcatgtgattgaacggcgtgctcttcctgagttcttcaatggaaaaaacaaatccaagactccagaaatatacttggcatatcgaaattttatgattgacacgtatcgtctaaacccccaagagtatttaactagcactgcttgtcggaggaacttgactggagatgtgtgtgctgtgatgagggtccatgcctttttagagcagtggggactcgttaattaccaagttgacccggaaagtagacccatggcaatgggacctcctcctactcctcattttaatgtattagctgataccccctctgggcttgtgcctctgcatcttcgatcacctcaggttcctgctgctcaacagatgctaaattttcctgagaaaaacaaggaaaaaccagttgatttgcagaactttggtctccgtactgacatttactccaagaaaacattagcaaagagtaaaggtgctagtgctggaagagaatggactgaacaggagacccttctactcctggaggccctggagatgtacaaggatgattggaacaaagtgtcggaacatgttggaagtcgtactcaggatgaatgcatcctccactttttgagacttcccattgaggacccataccttgagaattcagatgcttcccttgggcctttggcctaccagcctgtccccttcagtcagtcaggaaatccagttatgagtactgttgcttttttggcatctgtggtggaccctcgcgtggcatctgctgcagcaaaagcggctttggaggagttttctcgggtccgggaggaggtaccactggaattggttgaagctcatgtcaagaaagtacaagaagcagcacgagcctctgggaaagtggatcccacctacggtctggagagcagctgcattgcaggcacagggcccgatgagccagagaagcttgaaggagctgaagaggaaaaaatggaagccgaccctgatggtcagcagcctgaaaaggcagaaaataaagtggaaaatgaaacggatgaaggtgataaagcacaagatggagaaaatgaaaaaaatagtgaaaaggaacaggatagtgaagtgagtgaggataccaaatcagaagaaaaggagactgaagagaacaaagaactcactgatacatgtaaagaaagagaaagtgatactgggaagaagaaagtagaacatgaaatttccgaaggaaatgttgccacagccgcagcagctgctcttgcctcagcggctaccaaagccaagcacctggctgcagtggaagaaagaaagatcaagtccctggtagctctcttggttgagacacaaatgaagaaactagagatcaaacttcgacattttgaagagctggaaactatcatggacagagagaaagaagctctagaacaacagaggcagcagttgcttactgaacgccaaaacttccacatggaacagctgaagtatgctgaattacgagcacgacagcaaatggaacagcagcagcatggccagaaccctcaacaggcacaccagcactcaggaggacctggcctggccccacttggagcagcagggcaccctggcatgatgcctcatcaacagccccctccctaccctctgatgcaccaccagatgccaccacctcatccaccccagccaggtcagataccaggcccaggttccatgatgcccgggcagcacatgccaggccgcatgattcccactgttgcagccaacatccacccctctgggagtggccctacccctcctggcatgccaccaatgccaggaaacatcttaggaccccgggtacccctgacagcacctaacggcatgtatccccctccaccacagcagcagccaccgccaccaccacctgcagatggggtccctccgcctcctgctcctggcccgccagcctcagctgctccttagcctggaagatgcagggaacctccacgcccaccaccatgagctggagtggggatgacaagacttgtgttcctcaactttcttgggtttctttcaggatttttcttctcacagctccaagcacgtgtcccgtgcctccccactcctcttaccacccctctctctgacactttttgtgttgggtcctcagccaacactcaaggggaaacctgtagtgacagtgtgccctggtcatccttaaaataacctgcatctcccctgtcctggtgtgggagtaagctgacagtttctctgcaggtcctgtcaactttagcatgctatgtctttaccatttttgctctcttgcagttttttgctttgtcttatgcttctatggataatgctatataatcattatctttttatctttctgttattattgttttaaaggagagcatcctaagttaataggaaccaaaaaataatgatgggcagaagggggggaatagccacaggggacaaaccttaaggcattataagtgaccttatttctgcttttctgagctaagaatggtgctgatggtaaagtttgagacttttgccacacacaaatttgtgaaaattaaacgagatgtggaaggagaacctcagtgattttattccctagtgaggcctctgagggcctccacactgcctggcagaacataccactgaactagtatgtgctagaggagggcacaaacatccgctccttccctaggcctgctggctctggttttctatgcagatgattcattggattgggggtgagtgttttgtttttctgggggcagtgtgagctttgagggttggaatattgggaggcattccttagtttcctcaactagcctggaaagttaggagtctagggtaattacccccaatgagtctagcctactattcactgctttgtgtgcatttttttctccctctttaaaaaaccctttaaaagaaaaaaaaaagtagatagtgctaaatattttagctcatgaaacttggttaggatggctgggggtacaagtccccaaactacctcttgttacagtagccagggagtggaatttcgtcaaccggtacttttaaggttaggatgggacgggaaaagtgaagcaggatattagctccttataccttctcccttccatttctgagatctcacattccatctatcacagggttttcaaagagatgctgagggtaacaaggaactcacttggcagtcagagcatcatgctttgaggtttggggtgctcaggctgggagggtagaatgccattccagaggacaagccacaaaaatgccttaatttgagctcgtatttacccctgctgataagtgacttgagagttcccggttttttcctcttgtccttccctcccttctgtccttccatgtgtggggaaagggtgtttttggtagagcttggtttccaaagcgcctggctttctcacttcacattctcaagtggcagtttcattatttagaatgcaaggtggacatcttttggatatctttttctatatattttctaaagctttacatatgagagggtatagggaggtgtttataaaacacttgagaacttttttccttaatatcagaaagcaaaaaaataaaaccacaattgagatttgcctttcaaaccctcaggtttgcctctaaccaggtgtccctggtcaccatcagagtactggaatacgggaaccgaggagaccttggtccttttgtttttgttctggactcttgggagtggaaatgagaatgagtttattcctactggagcttagttccaatgcatttggctccagaaagaccccagtgccttttgacaatggccagggttttacctacttcctgccagtctttcccaaaggaaactcattccaaatacttcttttttcccctggagtccgagaaggaaaatggaattctggttcatactgtggtcccttgtaacctcaggtctttaatgtgatcactttcaaatttaaaagatccaggtggaaatatttttactatagtaataattctacaaaatacctgaattcttaacactgttatatttcagtataagtggtggctttttcttttcatgtctttgatctggttttattcctgtaattcagccacctgattttgtgaggggggggaataatatgtggtttttgtacaaacatgtttctcagtgtgttgttattttggaaaaaatgaggggagggagtttggcaagaatggagaaaatgaatgaagaaggcctaatctctctctttttcagtgaataaatggaacaccatttctggattctaaaaaaaaaaaaaaaaaaaaaaaa

SEQ ID NO: 61 - protein, 1104 aa, Homo sapiens
MAAAAGGGGPGTAVGATGSGIAAAAAGLAVYRRKDGGPATKFWESPETVSQLDSVRVWLGKHYKKYVHADAPTNKTLAGLVVQLLQFQEDAFGKHVTNPAFTKLPAKCFMDFKAGGALCHILGAAYKYKNEQGWRRFDLQNPSRMDRNVEMFMNIEKTLVQNNCLTRPNIYLIPDIDLKLANKLKDIIKRHQGTFTDEKSKASHHIYPYSSSQDDEEWLRPVMRKEKQVLVHWGFYPDSYDTWVHSNDVDAEIEDPPIPEKPWKVHVKWILDTDIFNEWMNEEDYEVDENRKPVSFRQRISTKNEEPVRSPERRDRKASANARKRKHSPSPPPPTPTESRKKSGKKGQASLYGKRRSQKEEDEQEDLTKDMEDPTPVPNIEEVVLPKNVNLKKDSENTPVKGGTVADLDEQDEETVTAGGKEDEDPAKGDQSRSVDLGEDNVTEQTNHIIIPSYASWFDYNCIHVIERRALPEFFNGKNKSKTPEIYLAYRNFMIDTYRLNPQEYLTSTACRRNLTGDVCAVMRVHAFLEQWGLVNYQVDPESRPMAMGPPPTPHFNVLADTPSGLVPLHLRSPQVPAAQQMLNFPEKNKEKPVDLQNFGLRTDIYSKKTLAKSKGASAGREWTEQETLLLLEALEMYKDDWNKVSEHVGSRTQDECILHFLRLPIEDPYLENSDASLGPLAYQPVPFSQSGNPVMSTVAFLASVVDPRVASAAAKAALEEFSRVREEVPLELVEAHVKKVQEAARASGKVDPTYGLESSCIAGTGPDEPEKLEGAEEEKMEADPDGQQPEKAENKVENETDEGDKAQDGENEKNSEKEQDSEVSEDTKSEEKETEENKELTDTCKERESDTGKKKVEHEISEGNVATAAAAALASAATKAKHLAAVEERKIKSLVALLVETQMKKLEIKLRHFEELETIMDREKEALEQQRQQLLTERQNFHMEQLKYAELRARQQMEQQQHGQNPQQAHQHSGGPGLAPLGAAGHPGMMPHQQPPPYPLMHHQMPPPHPPQPGQIPGPGSMMPGQHMPGRMIPTVAANIHPSGSGPTPPGMPPMPGNILGPRVPLTAPNGMYPPPPQQQPPPPPPADGVPPPPAPGPPASAP

SEQ ID NO: 62 - DNA, 5684 bp, Mus musculus
ggaggtggcatctgcgcgcgcgcgcgcgggtgcgaacgggaaacgccgcgagggccaggctaggccgggcggtagacacgacggacggtgactatggccgcgacagcgggtggcggtccgggagcagcagcaggcgccgtgggtgcagggggtgcggcggcggcctccgggctggccgtgtaccggaggaaggacgggggcccggccagcaagttttgggagagcccggacacggtgtcccagctagattcggtgcgagtctggctgggcaagcactacaagaagtatgttcatgcagatgctcctaccaataaaacactagctggactggtggtgcagcttctacagttccaagaagatgcctttgggaagcatgtcaccaacccagctttcaccaaactacctgcaaaatgtttcatggatttcaaagctggaggcaccttgtgtcacattcttggggcagcttacaagtacaaaaatgaacagggctggcggagatttgatcttcagaacccatcccgaatggatcgtaacgttgaaatgttcatgaacattgagaaaacattggtacagaacaactgtctgactagaccaaacatctacctcattccagacattgatttgaagttggctaacaagttgaaagatatcatcaaacggcatcaggggacatttactgatgagaagtcaaaagcttcccaccatatttatccatatccttcctcacaagaggatgaggagtggctgagaccagtgatgaggagagacaagcaggtgctggtgcactggggtttctacccagacagctatgacacttgggtccacagtaatgatgttgatgctgaaattgaagatgcaccaatcccagaaaagccctggaaggttcatgtaaaatggattttggacactgacgttttcaatgaatggatgaatgaagaggattatgaagtggatgagaacagaaagccagtgagctttcgtcaacgaatttcaacaaagaatgaagagccagtcagaagtccagaaaggagagacagaaaagcctctgccaactctaggaagaggaaaccttccccttctcctcctcctcccacagccacagagtcccgcaagaagagcgggaagaaaggacaagctagcctttatgggaaacgtagaagtcagaaggaagaagatgagcaagaagatcttaccaaggacatggaagaccccacacctgtacctaacatagaggaagtggttctccctaagaatgtaaacccaaagaaggacagtgaaaacacacccgttaaaggaggcacggtggcagatctagatgagcaggatgaagaagcagttacaacaggaggaaaggaagatgaagatcccagcaaaggtgatccaagtcgctcagttgacccaggtgaagacaacgtgacagaacagaccaatcacatcattattcccagctacgcatcctggtttgattataattgtattcatgtcattgaacggcgtgcgcttcctgagttctttaatggaaaaaacaaatccaagacccctgaaatatacttggcatatcgaaattttatgattgacacataccgtctaaaccctcaagaatatttaaccagcactgcttgccggcgaaacctgactggagatgtgtgtgctgtgatgagggttcatgccttcttagagcagtggggtcttgttaactaccaagttgacccagagagtcgacccatggcaatgggacctcctcccactcctcacttcaatgtgttagctgacacaccctctgggcttgtgcccctgcatcttcgatcacctcaggtccctgccgctcaacagatgttaaattttcctgagaagaacaaggaaaaaccaattgatttgcagaactttggtcttcgaactgacatttactccaagaaaacactggcaaagagtaaaggtgctagtgctggaagggagtggacagaacaggagacccttcttctcctagaggctctggagatgtacaaggacgattggaataaagtgtcagaacatgttggaagccgtactcaggacgaatgcatcctccactttctgaggcttcccattgaggacccttaccttgaaaattcagatgcttctcttgggccactggcttaccagcctgtccctttcagccagtcgggaaacccggtgatgagcactgttgcctttttagcatctgtcgttgacccccgtgtagcatctgctgcagcaaaagcagcgttggaggagttttctcgtgtccgagaagaagtacccctggaattggttgaagcacatgtcaagaaagtacaggaagctgcaagagcctctgggaaggtggaccccacctatggcttggagagcagctgtattgctggcacagggcctgacgagccagagaagcttgaaggatctgaagaagagaagatggaaacagatcctgatggtcagcagcctgaaaaggcagaaaacaaagtggaaaatgaatcggatgaaggtgataaaatacaagatcgagagaatgaaaaaaacactgagaaggaacaagatagtgacgtcagtgaggatgtcaagccagaagaaaaggagaatgaagagaacaaagagctcactgatacatgtaaagaaagagaaagcgatgccgggaagaagaaagtggaacacgagatttcggaaggaaacgttgccacagccgcagcagctgctctggcctcagctgctactaaagccaagcacctggcggctgttgaagaaagaaaaatcaagtccttggtagctctcttggttgaaacacaaatgaagaaactagagatcaaacttcgacattttgaagagctggagactataatggacagagagaaagaggctctagaacaacagagacagcagttgcttactgagcgtcagaacttccacatggaacagttgaaatatgctgaactacgtgcccggcagcaaatggagcagcagcagcagcatggccagacacctcagcaggcgcaccagcacacgggagggccggggatggccccacttggagccacaggccaccctggcatgatgccgcatcagcagccccctccctacccactgatgcaccatcagatgccgccaccccatcctccccaaccaggtcaaataccaggccctggctccatgatgcctggccagcccatgccaggtcgcatgatccccgctgtggcagccaacattcaccctactgggagtggccctacccctcctggtatgcctccaatgcccggaaacatcttaggaccccgggtacccctcacagcaccaaacggcatgtatcctcctccaccacagcagcagcagccgcctcctcctgcagatggggtccctccacctcctgctccaggcccacccgcctcggccactccctagcctggaagatacaagagcctccacagccaccacaagcaggaatggggatggcaggacttgtgtctcggcttccttggttttcttgcaggatttttttttcacaaccccaagcacaagccccatgtctctccactccttgatacttcttgtgtcaggtccttagttgacactcattgggaagcctgtggtgactgatgtgctctggtcatttaaaaagtaccatgtgtctcccctgtccccgtgtgacagatgttggcaggtggtctgcaggtcctgttgtgttgacattagtattctttgtgtgtatctctctctgtctctctctctctgctttgtctaaggcttcaatgtataatcctctataattattgtcctttcttcctttgtaatggttgtttttttaaggaaagtatcctaagttaatagaaaccaaaaaaaatggtaatgggcagaaagagatagccacagagggacacaccttaaggcattataagtgaccttatttctgcttatctgagctagagtggtgctactgatagagtccctgagacttgtcacacataagtgcaccaagatgagaagagctggggaaagggggtatcctttcgatttgatttcctggtgaggaccatgaaggacttccctgtgcctggaagaacatgccactgtacctagtacacgatagatagcaaagagcacagctttacaacaagcccttcctaccttctcccgccattctggttgtctgtgcagaagatttgcaggattggaacatggtggttgttttcccaagggcagcgtgagctttcagagttggggttttcccagtctaacaaagataaagggtctggggccctacctacaaacctttaggaacccttccaaacctcccaaccttccccaaacacatagggcctaccctcgccaccccaataaacattacatgttttttaaaccttcctataagaaaggaaaaaaatgtaaaatgggttatagattatgttgaacattttatctcatgcggcttggtgggggtgggggtacagatccctaaactacctcttgctgtagccagggtgagcggggttcttaagcggtactgaggtgcagaacgggagtgggaatgctcacatgtgatgagcagcctcctgtacctcacattctgagacctcacattccatctgttgtcacagggttatggagactgtgctaatggcacaaggacctcacttggctccagagtgcgaggctgtaaggtttaagtgccatcccagaggaattgccaccaaaaaaaaaaaaaaaagccttaatctgagcctgtatctacccctgctgatgaacaactagatgggttttggttttgccagcttctttcctccctccctccctccctccctccctccctccctcctttctgtctttccattagtagcaaaagggtgtttttagcagaactttaagtggcagtttcattcttgagagtgcaaggtagagcaccttacgggtgtatttttatgtgtattttaaagctttatgtatgagagctataggtaggcatttcttaataacacaaaaacctacagttgagatttgcctttaagactcttggttttcctctaaccaggagcccacgtcaccgccagagtcctggagctagagctaatgactccagagccttggggtggaaatggagattcgcttattccctgggtgcttgtttttcctccaggaaaaccccggtgtcttctgaccgcagccagggttgccctccttccctccattctctcccaaagtaaattgactccagcacttgccttctccccggagtcctaggggaggtataggactctgcttgtctgtaacctgaggtctgtaatgtgattgctttccagttttgagagatgcaagtgggaatagtttttacattgttgataatctatagaacctaagttcaacacttcaacacagctctttccatgactgtcagttaggtatcattcctgtaataacacccatccagttttgtgaggggcgggcttggatactgtgtggtttttgtacaaatgtgtttctcagtgtgggtttttgttttttgttgggttttttttttttttttggtgtttttttgtttgtttatttgttttttttctttaggttttgttctaatgaggtaaaggagctttgagagtttgggagaaaatgaatgaaagtggcttaatgtccctcgtttgcattgaataaatgaaataccatttatgaattctaaaaaaaaaaaa

SEQ ID NO: 63 - protein, 1104 aa, Mus musculus
MAATAGGGPGAAAGAVGAGGAAAASGLAVYRRKDGGPASKFWESPDTVSQLDSVRVWLGKHYKKYVHADAPTNKTLAGLVVQLLQFQEDAFGKHVTNPAFTKLPAKCFMDFKAGGTLCHILGAAYKYKNEQGWRRFDLQNPSRMDRNVEMFMNIEKTLVQNNCLTRPNIYLIPDIDLKLANKLKDIIKRHQGTFTDEKSKASHHIYPYPSSQEDEEWLRPVMRRDKQVLVHWGFYPDSYDTWVHSNDVDAEIEDAPIPEKPWKVHVKWILDTDVFNEWMNEEDYEVDENRKPVSFRQRISTKNEEPVRSPERRDRKASANSRKRKPSPSPPPPTATESRKKSGKKGQASLYGKRRSQKEEDEQEDLTKDMEDPTPVPNIEEVVLPKNVNPKKDSENTPVKGGTVADLDEQDEEAVTTGGKEDEDPSKGDPSRSVDPGEDNVTEQTNHIIIPSYASWFDYNCIHVIERRALPEFFNGKNKSKTPEIYLAYRNFMIDTYRLNPQEYLTSTACRRNLTGDVCAVMRVHAFLEQWGLVNYQVDPESRPMAMGPPPTPHFNVLADTPSGLVPLHLRSPQVPAAQQMLNFPEKNKEKPIDLQNFGLRTDIYSKKTLAKSKGASAGREWTEQETLLLLEALEMYKDDWNKVSEHVGSRTQDECILHFLRLPIEDPYLENSDASLGPLAYQPVPFSQSGNPVMSTVAFLASVVDPRVASAAAKAALEEFSRVREEVPLELVEAHVKKVQEAARASGKVDPTYGLESSCIAGTGPDEPEKLEGSEEEKMETDPDGQQPEKAENKVENESDEGDKIQDRENEKNTEKEQDSDVSEDVKPEEKENEENKELTDTCKERESDAGKKKVEHEISEGNVATAAAAALASAATKAKHLAAVEERKIKSLVALLVETQMKKLEIKLRHFEELETIMDREKEALEQQRQQLLTERQNFHMEQLKYAELRARQQMEQQQQHGQTPQQAHQHTGGPGMAPLGATGHPGMMPHQQPPPYPLMHHQMPPPHPPQPGQIPGPGSMMPGQPMPGRMIPAVAANIHPTGSGPTPPGMPPMPGNILGPRVPLTAPNGMYPPPPQQQQPPPPADGVPPPPAPGPPASATP

SEQ ID NO: 64 - DNA, 5106 bp, Homo sapiens
ggaggcggcggccgcggcggcgggaggcggcgggaggcgggcggaggaggaggcggaggaggcgggagctgagctgagtggggcgggcggcggcggggcccgagccggagaagatggcggtgcggaagaaggacggcggccccaacgtgaagtactacgaggccgcggacaccgtgacccagttcgacaacgtgcggctgtggctcggcaagaactacaagaagtatatacaagctgaaccacccaccaacaagtccctgtctagcctggttgtacagttgctacaatttcaggaagaagtttttggcaaacatgtcagcaatgcaccgctcactaaactgccgatcaaatgtttcctagatttcaaagcgggaggctccttgtgccacattcttgcagctgcctacaaattcaagagtgaccagggatggcggcgttacgatttccagaatccatcacgcatggaccgcaatgtggaaatgtttatgaccattgagaagtccttggtgcagaataattgcctgtctcgacctaacatttttctgtgcccagaaattgagcccaaactactagggaaattaaaggacattatcaagagacaccagggaacagtcactgaggataagaacaatgcctcccatgttgtgtatcctgtcccggggaatctagaagaagaggaatgggtacgaccagtcatgaagagggataagcaggttcttctgcactggggctactatcctgacagttacgacacgtggatcccagcgagtgaaattgaggcatctgtggaagatgctccaactcctgagaaacctaggaaggttcatgcaaagtggatcctggacaccgacaccttcaatgaatggatgaatgaggaagactatgaagtaaatgatgacaaaaaccctgtctcccgccgaaagaagatttcagccaagacactgacagatgaggtgaacagcccagattcagatcgacgggacaagaaggggggaaactataagaagaggaagcgctccccctctccttcaccaaccccagaagcaaagaagaaaaatgctaagaaaggtccctcaacaccttacactaagtcaaagcgtggccacagagaagaggagcaagaagacctgacaaaggacatggacgagccctcaccagtccccaatgtagaagaggtgacacttcccaaaacagtcaacacaaagaaagactcagagtcggccccagtcaaaggcggcaccatgaccgacctggatgaacaggaagatgaaagcatggagacgacgggcaaggatgaggatgagaacagtacggggaacaagggagagcagaccaagaatccagacctgcatgaggacaatgtgactgaacagacccaccacatcatcattcccagctacgctgcctggtttgactacaatagtgttcatgccattgagcggagggctctccccgagttcttcaacggcaagaacaagtccaagactccagagatctacctggcctatcgaaactttatgattgacacttaccgactgaacccccaagagtatcttacctctaccgcctgccgccgaaacctagcgggtgatgtctgtgccatcatgagggtccatgccttcctagaacagtggggtcttattaactaccaggtggatgctgagagtcgaccaaccccaatggggcctccgcctacctctcacttccatgtcttggctgacacaccatcagggctggtgcctctgcagcccaagacacctcagcagacctctgcttcccaacaaatgctcaactttcctgacaaaggcaaagagaaaccaacagacatgcaaaactttgggctgcgcacagacatgtacacaaaaaagaatgttccctccaagagcaaggctgcagccagtgccactcgtgagtggacagaacaggaaaccctgcttctcctggaggcactggaaatgtacaaagatgactggaacaaagtgtccgagcatgtgggaagccgcacacaggacgagtgcatcttgcattttcttcgtcttcccattgaagacccatacctggaggactcagaggcctccctaggccccctggcctaccaacccatccccttcagtcagtcgggcaaccctgttatgagcactgttgccttcctggcctctgtcgtcgatccccgagtcgcctctgctgctgcaaagtcagccctagaggagttctccaaaatgaaggaagaggtacccacggccttggtggaggcccatgttcgaaaagtggaagaagcagccaaagtaacaggcaaggcggaccctgccttcggtctggaaagcagtggcattgcaggaaccacctctgatgagcctgagcggattgaggagagcgggaatgacgaggctcgggtggaaggccaggccacagatgagaagaaggagcccaaggaaccccgagaaggagggggtgctatagaggaggaagcaaaagagaaaaccagcgaggctcccaagaaggatgaggagaaagggaaagaaggcgacagtgagaaggagtccgagaagagtgatggagacccaatagtcgatcctgagaaggagaaggagccaaaggaagggcaggaggaagtgctgaaggaagtggtggagtctgagggggaaaggaagacaaaggtggagcgggacattggcgagggcaacctctccaccgctgctgccgccgccctggccgccgccgcagtgaaagctaagcacttggctgctgttgaggaaaggaagatcaaatctttggtggccctgctggtggagacccagatgaaaaagttggagatcaaacttcggcactttgaggagctggagactatcatggaccgggagcgagaagcactggagtatcagaggcagcagctcctggccgacagacaagccttccacatggagcagctgaagtatgcggagatgagggctcggcagcagcacttccaacagatgcaccaacagcagcagcagccaccaccagccctgcccccaggctcccagcctatccccccaacaggggctgctgggccacccgcagtccatggcttggctgtggctccagcctctgtagtccctgctcctgctggcagtggggcccctccaggaagtttgggcccttctgaacagattgggcaggcagggtcaactgcagggccacagcagcagcaaccagctggagccccccagcctggggcagtcccaccaggggttcccccccctggaccccatggcccctcaccgttccccaaccaacaaactcctccctcaatgatgccaggggcagtgccaggcagcgggcacccaggcgtggcgggtaatgctcctttgggtttgccttttggcatgccgcctcctcctcctcctcctgctccatccatcatcccatttggtagtctagctgactccatcagtattaacctccccgctcctcctaacctgcatgggcatcaccaccatctcccgttcgccccgggcactctccccccacctaacctgcctgtgtccatggcgaaccctctacatcctaacctgccggcgaccaccaccatgccatcttccttgcctctcgggccggggctcggatccgccgcagcccaaagccctgccattgtggcagctgttcagggcaacctcctgcccagtgccagcccactgccagacccaggcacccccctgcctccagaccccacagccccgagcccaggcacggtcacccctgtgccacctccacagtgaggagccagccagacatctctccccctcaccccctgtggacatcacggttccaggaacagcccttcccccaccactgggaccctccccagcctggagagttcatcactacgtaaggaaagctccttccgcccctccaaagccctcaccatgcctaacagaggcatgcatttttatatcagattattcaaggacttctgtttaaaagatgtttataatgtctgggagagaggataggatgggaatgctgccctaaaggaagggctggtgaaaggtgtttatacaaggttctattaaccacttctaagggtacacctccctccaaactactgcattttctatggattaaaaaaaaaaaaaaaaagtagattttaaaaagccacattggagctcccttctacccactaaaaaataaccaatttttacattttttgagggggagtgagttttaggaaaggggaattaagattccagggagagctctggggatagaacagggcgcagattccatctctccccaagcccctttttagtgactaagtcaaggccccaactcccctcccccaccctacgctgagcttattcgagttcattcgtactaataatccctcctgcggcttcctcattgttgctgttttaggccaccccagctcagccaatgattcctttccctctgaatgtcagttttgtttttaaaagtcacttgcttagttgatgtcagcgtatgtgtatttggtggggaaaacctaatttcggggatttctgtggtaggtaataggagaagaaagggcactgggggctgttctccttccttccctgggctgtatccatggactcctggaaggcacagagaagggagctataagaggatgtgaagttttaaaacctgaaattgttttttaaagcacttaagcacctccatattatgacttggtgggtcaccccttagcttcctccctctcccaccaagactatgagaacttcagctgatagctgggggctccccagatgaggatgcagggatttgggagcagtggaagagggtgcccaaccttgggttggaccaacccttggctcgcagctcaactctgcttcccgcattcctgctccacgtgtcccagcttctcccctgtgacgggaaggcaggtgtgactccaggctctgcactggttcttcttggttcctcccaccaggccctttgttcctcatgtccccatgtttctctccctctgcgtcttagcacctttcttctgttcaaagttttctgtaaattttctctttttttctttctttcttttttttttttttataaattaatttgctttcagttccaaaaaaaaaaaaaaaaaaa

SEQ ID NO: 65 - protein, 1214 aa, Homo sapiens
MAVRKKDGGPNVKYYEAADTVTQFDNVRLWLGKNYKKYIQAEPPTNKSLSSLVVQLLQFQEEVFGKHVSNAPLTKLPIKCFLDFKAGGSLCHILAAAYKFKSDQGWRRYDFQNPSRMDRNVEMFMTIEKSLVQNNCLSRPNIFLCPEIEPKLLGKLKDIIKRHQGTVTEDKNNASHVVYPVPGNLEEEEWVRPVMKRDKQVLLHWGYYPDSYDTWIPASEIEASVEDAPTPEKPRKVHAKWILDTDTFNEWMNEEDYEVNDDKNPVSRRKKISAKTLTDEVNSPDSDRRDKKGGNYKKRKRSPSPSPTPEAKKKNAKKGPSTPYTKSKRGHREEEQEDLTKDMDEPSPVPNVEEVTLPKTVNTKKDSESAPVKGGTMTDLDEQEDESMETTGKDEDENSTGNKGEQTKNPDLHEDNVTEQTHHIIIPSYAAWFDYNSVHAIERRALPEFFNGKNKSKTPEIYLAYRNFMIDTYRLNPQEYLTSTACRRNLAGDVCAIMRVHAFLEQWGLINYQVDAESRPTPMGPPPTSHFHVLADTPSGLVPLQPKTPQQTSASQQMLNFPDKGKEKPTDMQNFGLRTDMYTKKNVPSKSKAAASATREWTEQETLLLLEALEMYKDDWNKVSEHVGSRTQDECILHFLRLPIEDPYLEDSEASLGPLAYQPIPFSQSGNPVMSTVAFLASVVDPRVASAAAKSALEEFSKMKEEVPTALVEAHVRKVEEAAKVTGKADPAFGLESSGIAGTTSDEPERIEESGNDEARVEGQATDEKKEPKEPREGGGAIEEEAKEKTSEAPKKDEEKGKEGDSEKESEKSDGDPIVDPEKEKEPKEGQEEVLKEVVESEGERKTKVERDIGEGNLSTAAAAALAAAAVKAKHLAAVEERKIKSLVALLVETQMKKLEIKLRHFEELETIMDREREALEYQRQQLLADRQAFHMEQLKYAEMRARQQHFQQMHQQQQQPPPALPPGSQPIPPTGAAGPPAVHGLAVAPASVVPAPAGSGAPPGSLGPSEQIGQAGSTAGPQQQQPAGAPQPGAVPPGVPPPGPHGPSPFPNQQTPPSMMPGAVPGSGHPGVAGNAPLGLPFGMPPPPPPPAPSIIPFGSLADSISINLPAPPNLHGHHHHLPFAPGTLPPPNLPVSMANPLHPNLPATTTMPSSLPLGPGLGSAAAQSPAIVAAVQGNLLPSASPLPDPGTPLPPDPTAPSPGTVTPVPPPQ

SEQ ID NO: 66 - DNA, 4854 bp, Homo sapiens
ggaggcggcggccgcggcggcgggaggcggcgggaggcgggcggaggaggaggcggaggaggcgggagctgagctgagtggggcgggcggcggcggggcccgagccggagaagatggcggtgcggaagaaggacggcggccccaacgtgaagtactacgaggccgcggacaccgtgacccagttcgacaacgtgcggctgtggctcggcaagaactacaagaagtatatacaagctgaaccacccaccaacaagtccctgtctagcctggttgtacagttgctacaatttcaggaagaagtttttggcaaacatgtcagcaatgcaccgctcactaaactgccgatcaaatgtttcctagatttcaaagcgggaggctccttgtgccacattcttgcagctgcctacaaattcaagagtgaccagggatggcggcgttacgatttccagaatccatcacgcatggaccgcaatgtggaaatgtttatgaccattgagaagtccttggtgcagaataattgcctgtctcgacctaacatttttctgtgcccagaaattgagcccaaactactagggaaattaaaggacattatcaagagacaccagggaacagtcactgaggataagaacaatgcctcccatgttgtgtatcctgtcccggggaatctagaagaagaggaatgggtacgaccagtcatgaagagggataagcaggttcttctgcactggggctactatcctgacagttacgacacgtggatcccagcgagtgaaattgaggcatctgtggaagatgctccaactcctgagaaacctaggaaggttcatgcaaagtggatcctggacaccgacaccttcaatgaatggatgaatgaggaagactatgaagtaaatgatgacaaaaaccctgtctcccgccgaaagaagatttcagccaagacactgacagatgaggtgaacagcccagattcagatcgacgggacaagaaggggggaaactataagaagaggaagcgctccccctctccttcaccaaccccagaagcaaagaagaaaaatgctaagaaaggtccctcaacaccttacactaagtcaaagcgtggccacagagaagaggagcaagaagacctgacaaaggacatggacgagccctcaccagtccccaatgtagaagaggtgacacttcccaaaacagtcaacacaaagaaagactcagagtcggccccagtcaaaggcggcaccatgaccgacctggatgaacaggaagatgaaagcatggagacgacgggcaaggatgaggatgagaacagtacggggaacaagggagagcagaccaagaatccagacctgcatgaggacaatgtgactgaacagacccaccacatcatcattcccagctacgctgcctggtttgactacaatagtgttcatgccattgagcggagggctctccccgagttcttcaacggcaagaacaagtccaagactccagagatctacctggcctatcgaaactttatgattgacacttaccgactgaacccccaagagtatcttacctctaccgcctgccgccgaaacctagcgggtgatgtctgtgccatcatgagggtccatgccttcctagaacagtggggtcttattaactaccaggtggatgctgagagtcgaccaaccccaatggggcctccgcctacctctcacttccatgtcttggctgacacaccatcagggctggtgcctctgcagcccaagacacctcagggccgccaggttgatgctgataccaaggctgggcgaaagggcaaagagctggatgacctggtgccagagacggctaagggcaagccagagctgcagacctctgcttcccaacaaatgctcaactttcctgacaaaggcaaagagaaaccaacagacatgcaaaactttgggctgcgcacagacatgtacacaaaaaagaatgttccctccaagagcaaggctgcagccagtgccactcgtgagtggacagaacaggaaaccctgcttctcctggaggcactggaaatgtacaaagatgactggaacaaagtgtccgagcatgtgggaagccgcacacaggacgagtgcatcttgcattttcttcgtcttcccattgaagacccatacctggaggactcagaggcctccctaggccccctggcctaccaacccatccccttcagtcagtcgggcaaccctgttatgagcactgttgccttcctggcctctgtcgtcgatccccgagtcgcctctgctgctgcaaagtcagccctagaggagttctccaaaatgaaggaagaggtacccacggccttggtggaggcccatgttcgaaaagtggaagaagcagccaaagtaacaggcaaggcggaccctgccttcggtctggaaagcagtggcattgcaggaaccacctctgatgagcctgagcggattgaggagagcgggaatgacgaggctcgggtggaaggccaggccacagatgagaagaaggagcccaaggaaccccgagaaggagggggtgctatagaggaggaagcaaaagagaaaaccagcgaggctcccaagaaggatgaggagaaagggaaagaaggcgacagtgagaaggagtccgagaagagtgatggagacccaatagtcgatcctgagaaggagaaggagccaaaggaagggcaggaggaagtgctgaaggaagtggtggagtctgagggggaaaggaagacaaaggtggagcgggacattggcgagggcaacctctccaccgctgctgccgccgccctggccgccgccgcagtgaaagctaagcacttggctgctgttgaggaaaggaagatcaaatctttggtggccctgctggtggagacccagatgaaaaagttggagatcaaacttcggcactttgaggagctggagactatcatggaccgggagcgagaagcactggagtatcagaggcagcagctcctggccgacagacaagccttccacatggagcagctgaagtatgcggagatgagggctcggcagcagcacttccaacagatgcaccaacagcagcagcagccaccaccagccctgcccccaggctcccagcctatccccccaacaggggctgctgggccacccgcagtccatggcttggctgtggctccagcctctgtagtccctgctcctgctggcagtggggcccctccaggaagtttgggcccttctgaacagattgggcaggcagggtcaactgcagggccacagcagcagcaaccagctggagccccccagcctggggcagtcccaccaggggttcccccccctggaccccatggcccctcaccgttccccaaccaacaaactcctccctcaatgatgccaggggcagtgccaggcagcgggcacccaggcgtggcggacccaggcacccccctgcctccagaccccacagccccgagcccaggcacggtcacccctgtgccacctccacagtgaggagccagccagacatctctccccctcaccccctgtggacatcacggttccaggaacagcccttcccccaccactgggaccctccccagcctggagagttcatcactacgtaaggaaagctccttccgcccctccaaagccctcaccatgcctaacagaggcatgcatttttatatcagattattcaaggacttctgtttaaaagatgtttataatgtctgggagagaggataggatgggaatgctgccctaaaggaagggctggtgaaaggtgtttatacaaggttctattaaccacttctaagggtacacctccctccaaactactgcattttctatggattaaaaaaaaaaaaaaaaagtagattttaaaaagccacattggagctcccttctacccactaaaaaataaccaatttttacattttttgagggggagtgagttttaggaaaggggaattaagattccagggagagctctggggatagaacagggcgcagattccatctctccccaagcccctttttagtgactaagtcaaggccccaactcccctcccccaccctacgctgagcttattcgagttcattcgtactaataatccctcctgcggcttcctcattgttgctgttttaggccaccccagctcagccaatgattcctttccctctgaatgtcagttttgtttttaaaagtcacttgcttagttgatgtcagcgtatgtgtatttggtggggaaaacctaatttcggggatttctgtggtaggtaataggagaagaaagggcactgggggctgttctccttccttccctgggctgtatccatggactcctggaaggcacagagaagggagctataagaggatgtgaagttttaaaacctgaaattgttttttaaagcacttaagcacctccatattatgacttggtgggtcaccccttagcttcctccctctcccaccaagactatgagaacttcagctgatagctgggggctccccagatgaggatgcagggatttgggagcagtggaagagggtgcccaaccttgggttggaccaacccttggctcgcagctcaactctgcttcccgcattcctgctccacgtgtcccagcttctcccctgtgacgggaaggcaggtgtgactccaggctctgcactggttcttcttggttcctcccaccaggccctttgttcctcatgtccccatgtttctctccctctgcgtcttagcacctttcttctgttcaaagttttctgtaaattttctctttttttctttctttcttttttttttttttataaattaatttgctttcagttccaaaaaaaaaaaaaaaaaaa

SEQ ID NO: 67 - protein, 1130 aa, Homo sapiens
MAVRKKDGGPNVKYYEAADTVTQFDNVRLWLGKNYKKYIQAEPPTNKSLSSLVVQLLQFQEEVFGKHVSNAPLTKLPIKCFLDFKAGGSLCHILAAAYKFKSDQGWRRYDFQNPSRMDRNVEMFMTIEKSLVQNNCLSRPNIFLCPEIEPKLLGKLKDIIKRHQGTVTEDKNNASHVVYPVPGNLEEEEWVRPVMKRDKQVLLHWGYYPDSYDTWIPASEIEASVEDAPTPEKPRKVHAKWILDTDTFNEWMNEEDYEVNDDKNPVSRRKKISAKTLTDEVNSPDSDRRDKKGGNYKKRKRSPSPSPTPEAKKKNAKKGPSTPYTKSKRGHREEEQEDLTKDMDEPSPVPNVEEVTLPKTVNTKKDSESAPVKGGTMTDLDEQEDESMETTGKDEDENSTGNKGEQTKNPDLHEDNVTEQTHHIIIPSYAAWFDYNSVHAIERRALPEFFNGKNKSKTPEIYLAYRNFMIDTYRLNPQEYLTSTACRRNLAGDVCAIMRVHAFLEQWGLINYQVDAESRPTPMGPPPTSHFHVLADTPSGLVPLQPKTPQGRQVDADTKAGRKGKELDDLVPETAKGKPELQTSASQQMLNFPDKGKEKPTDMQNFGLRTDMYTKKNVPSKSKAAASATREWTEQETLLLLEALEMYKDDWNKVSEHVGSRTQDECILHFLRLPIEDPYLEDSEASLGPLAYQPIPFSQSGNPVMSTVAFLASVVDPRVASAAAKSALEEFSKMKEEVPTALVEAHVRKVEEAAKVTGKADPAFGLESSGIAGTTSDEPERIEESGNDEARVEGQATDEKKEPKEPREGGGAIEEEAKEKTSEAPKKDEEKGKEGDSEKESEKSDGDPIVDPEKEKEPKEGQEEVLKEVVESEGERKTKVERDIGEGNLSTAAAAALAAAAVKAKHLAAVEERKIKSLVALLVETQMKKLEIKLRHFEELETIMDREREALEYQRQQLLADRQAFHMEQLKYAEMRARQQHFQQMHQQQQQPPPALPPGSQPIPPTGAAGPPAVHGLAVAPASVVPAPAGSGAPPGSLGPSEQIGQAGSTAGPQQQQPAGAPQPGAVPPGVPPPGPHGPSPFPNQQTPPSMMPGAVPGSGHPGVADPGTPLPPDPTAPSPGTVTPVPPPQ

SEQ ID NO: 68 - DNA, 4920 bp, Homo sapiens
ggaggcggcggccgcggcggcgggaggcggcgggaggcgggcggaggaggaggcggaggaggcgggagctgagctgagtggggcgggcggcggcggggcccgagccggagaagatggcggtgcggaagaaggacggcggccccaacgtgaagtactacgaggccgcggacaccgtgacccagttcgacaacgtgcggctgtggctcggcaagaactacaagaagtatatacaagctgaaccacccaccaacaagtccctgtctagcctggttgtacagttgctacaatttcaggaagaagtttttggcaaacatgtcagcaatgcaccgctcactaaactgccgatcaaatgtttcctagatttcaaagcgggaggctccttgtgccacattcttgcagctgcctacaaattcaagagtgaccagggatggcggcgttacgatttccagaatccatcacgcatggaccgcaatgtggaaatgtttatgaccattgagaagtccttggtgcagaataattgcctgtctcgacctaacatttttctgtgcccagaaattgagcccaaactactagggaaattaaaggacattatcaagagacaccagggaacagtcactgaggataagaacaatgcctcccatgttgtgtatcctgtcccggggaatctagaagaagaggaatgggtacgaccagtcatgaagagggataagcaggttcttctgcactggggctactatcctgacagttacgacacgtggatcccagcgagtgaaattgaggcatctgtggaagatgctccaactcctgagaaacctaggaaggttcatgcaaagtggatcctggacaccgacaccttcaatgaatggatgaatgaggaagactatgaagtaaatgatgacaaaaaccctgtctcccgccgaaagaagatttcagccaagacactgacagatgaggtgaacagcccagattcagatcgacgggacaagaaggggggaaactataagaagaggaagcgctccccctctccttcaccaaccccagaagcaaagaagaaaaatgctaagaaaggtccctcaacaccttacactaagtcaaagcgtggccacagagaagaggagcaagaagacctgacaaaggacatggacgagccctcaccagtccccaatgtagaagaggtgacacttcccaaaacagtcaacacaaagaaagactcagagtcggccccagtcaaaggcggcaccatgaccgacctggatgaacaggaagatgaaagcatggagacgacgggcaaggatgaggatgagaacagtacggggaacaagggagagcagaccaagaatccagacctgcatgaggacaatgtgactgaacagacccaccacatcatcattcccagctacgctgcctggtttgactacaatagtgttcatgccattgagcggagggctctccccgagttcttcaacggcaagaacaagtccaagactccagagatctacctggcctatcgaaactttatgattgacacttaccgactgaacccccaagagtatcttacctctaccgcctgccgccgaaacctagcgggtgatgtctgtgccatcatgagggtccatgccttcctagaacagtggggtcttattaactaccaggtggatgctgagagtcgaccaaccccaatggggcctccgcctacctctcacttccatgtcttggctgacacaccatcagggctggtgcctctgcagcccaagacacctcagggccgccaggttgatgctgataccaaggctgggcgaaagggcaaagagctggatgacctggtgccagagacggctaagggcaagccagagctgcagacctctgcttcccaacaaatgctcaactttcctgacaaaggcaaagagaaaccaacagacatgcaaaactttgggctgcgcacagacatgtacacaaaaaagaatgttccctccaagagcaaggctgcagccagtgccactcgtgagtggacagaacaggaaaccctgcttctcctggaggcactggaaatgtacaaagatgactggaacaaagtgtccgagcatgtgggaagccgcacacaggacgagtgcatcttgcattttcttcgtcttcccattgaagacccatacctggaggactcagaggcctccctaggccccctggcctaccaacccatccccttcagtcagtcgggcaaccctgttatgagcactgttgccttcctggcctctgtcgtcgatccccgagtcgcctctgctgctgcaaagtcagccctagaggagttctccaaaatgaaggaagaggtacccacggccttggtggaggcccatgttcgaaaagtggaagaagcagccaaagtaacaggcaaggcggaccctgccttcggtctggaaagcagtggcattgcaggaaccacctctgatgagcctgagcggattgaggagagcgggaatgacgaggctcgggtggaaggccaggccacagatgagaagaaggagcccaaggaaccccgagaaggagggggtgctatagaggaggaagcaaaagagaaaaccagcgaggctcccaagaaggatgaggagaaagggaaagaaggcgacagtgagaaggagtccgagaagagtgatggagacccaatagtcgatcctgagaaggagaaggagccaaaggaagggcaggaggaagtgctgaaggaagtggtggagtctgagggggaaaggaagacaaaggtggagcgggacattggcgagggcaacctctccaccgctgctgccgccgccctggccgccgccgcagtgaaagctaagcacttggctgctgttgaggaaaggaagatcaaatctttggtggccctgctggtggagacccagatgaaaaagttggagatcaaacttcggcactttgaggagctggagactatcatggaccgggagcgagaagcactggagtatcagaggcagcagctcctggccgacagacaagccttccacatggagcagctgaagtatgcggagatgagggctcggcagcagcacttccaacagatgcaccaacagcagcagcagccaccaccagccctgcccccaggctcccagcctatccccccaacaggggctgctgggccacccgcagtccatggcttggctgtggctccagcctctgtagtccctgctcctgctggcagtggggcccctccaggaagtttgggcccttctgaacagattgggcaggcagggtcaactgcagggccacagcagcagcaaccagctggagccccccagcctggggcagtcccaccaggggttcccccccctggaccccatggcccctcaccgttccccaaccaacaaactcctccctcaatgatgccaggggcagtgccaggcagcgggcacccaggcgtggcggcccaaagccctgccattgtggcagctgttcagggcaacctcctgcccagtgccagcccactgccagacccaggcacccccctgcctccagaccccacagccccgagcccaggcacggtcacccctgtgccacctccacagtgaggagccagccagacatctctccccctcaccccctgtggacatcacggttccaggaacagcccttcccccaccactgggaccctccccagcctggagagttcatcactacgtaaggaaagctccttccgcccctccaaagccctcaccatgcctaacagaggcatgcatttttatatcagattattcaaggacttctgtttaaaagatgtttataatgtctgggagagaggataggatgggaatgctgccctaaaggaagggctggtgaaaggtgtttatacaaggttctattaaccacttctaagggtacacctccctccaaactactgcattttctatggattaaaaaaaaaaaaaaaaagtagattttaaaaagccacattggagctcccttctacccactaaaaaataaccaatttttacattttttgagggggagtgagttttaggaaaggggaattaagattccagggagagctctggggatagaacagggcgcagattccatctctccccaagcccctttttagtgactaagtcaaggccccaactcccctcccccaccctacgctgagcttattcgagttcattcgtactaataatccctcctgcggcttcctcattgttgctgttttaggccaccccagctcagccaatgattcctttccctctgaatgtcagttttgtttttaaaagtcacttgcttagttgatgtcagcgtatgtgtatttggtggggaaaacctaatttcggggatttctgtggtaggtaataggagaagaaagggcactgggggctgttctccttccttccctgggctgtatccatggactcctggaaggcacagagaagggagctataagaggatgtgaagttttaaaacctgaaattgttttttaaagcacttaagcacctccatattatgacttggtgggtcaccccttagcttcctccctctcccaccaagactatgagaacttcagctgatagctgggggctccccagatgaggatgcagggatttgggagcagtggaagagggtgcccaaccttgggttggaccaacccttggctcgcagctcaactctgcttcccgcattcctgctccacgtgtcccagcttctcccctgtgacgggaaggcaggtgtgactccaggctctgcactggttcttcttggttcctcccaccaggccctttgttcctcatgtccccatgtttctctccctctgcgtcttagcacctttcttctgttcaaagttttctgtaaattttctctttttttctttctttcttttttttttttttataaattaatttgctttcagttccaaaaaaaaaaaaaaaaaaa

SEQ ID NO: 69 - protein, 1152 aa, Homo sapiens
MAVRKKDGGPNVKYYEAADTVTQFDNVRLWLGKNYKKYIQAEPPTNKSLSSLVVQLLQFQEEVFGKHVSNAPLTKLPIKCFLDFKAGGSLCHILAAAYKFKSDQGWRRYDFQNPSRMDRNVEMFMTIEKSLVQNNCLSRPNIFLCPEIEPKLLGKLKDIIKRHQGTVTEDKNNASHVVYPVPGNLEEEEWVRPVMKRDKQVLLHWGYYPDSYDTWIPASEIEASVEDAPTPEKPRKVHAKWILDTDTFNEWMNEEDYEVNDDKNPVSRRKKISAKTLTDEVNSPDSDRRDKKGGNYKKRKRSPSPSPTPEAKKKNAKKGPSTPYTKSKRGHREEEQEDLTKDMDEPSPVPNVEEVTLPKTVNTKKDSESAPVKGGTMTDLDEQEDESMETTGKDEDENSTGNKGEQTKNPDLHEDNVTEQTHHIIIPSYAAWFDYNSVHAIERRALPEFFNGKNKSKTPEIYLAYRNFMIDTYRLNPQEYLTSTACRRNLAGDVCAIMRVHAFLEQWGLINYQVDAESRPTPMGPPPTSHFHVLADTPSGLVPLQPKTPQGRQVDADTKAGRKGKELDDLVPETAKGKPELQTSASQQMLNFPDKGKEKPTDMQNFGLRTDMYTKKNVPSKSKAAASATREWTEQETLLLLEALEMYKDDWNKVSEHVGSRTQDECILHFLRLPIEDPYLEDSEASLGPLAYQPIPFSQSGNPVMSTVAFLASVVDPRVASAAAKSALEEFSKMKEEVPTALVEAHVRKVEEAAKVTGKADPAFGLESSGIAGTTSDEPERIEESGNDEARVEGQATDEKKEPKEPREGGGAIEEEAKEKTSEAPKKDEEKGKEGDSEKESEKSDGDPIVDPEKEKEPKEGQEEVLKEVVESEGERKTKVERDIGEGNLSTAAAAALAAAAVKAKHLAAVEERKIKSLVALLVETQMKKLEIKLRHFEELETIMDREREALEYQRQQLLADRQAFHMEQLKYAEMRARQQHFQQMHQQQQQPPPALPPGSQPIPPTGAAGPPAVHGLAVAPASVVPAPAGSGAPPGSLGPSEQIGQAGSTAGPQQQQPAGAPQPGAVPPGVPPPGPHGPSPFPNQQTPPSMMPGAVPGSGHPGVAAQSPAIVAAVQGNLLPSASPLPDPGTPLPPDPTAPSPGTVTPVPPPQ

SEQ ID NO: 70 - DNA, 5199 bp, Homo sapiens
ggaggcggcggccgcggcggcgggaggcggcgggaggcgggcggaggaggaggcggaggaggcgggagctgagctgagtggggcgggcggcggcggggcccgagccggagaagatggcggtgcggaagaaggacggcggccccaacgtgaagtactacgaggccgcggacaccgtgacccagttcgacaacgtgcggctgtggctcggcaagaactacaagaagtatatacaagctgaaccacccaccaacaagtccctgtctagcctggttgtacagttgctacaatttcaggaagaagtttttggcaaacatgtcagcaatgcaccgctcactaaactgccgatcaaatgtttcctagatttcaaagcgggaggctccttgtgccacattcttgcagctgcctacaaattcaagagtgaccagggatggcggcgttacgatttccagaatccatcacgcatggaccgcaatgtggaaatgtttatgaccattgagaagtccttggtgcagaataattgcctgtctcgacctaacatttttctgtgcccagaaattgagcccaaactactagggaaattaaaggacattatcaagagacaccagggaacagtcactgaggataagaacaatgcctcccatgttgtgtatcctgtcccggggaatctagaagaagaggaatgggtacgaccagtcatgaagagggataagcaggttcttctgcactggggctactatcctgacagttacgacacgtggatcccagcgagtgaaattgaggcatctgtggaagatgctccaactcctgagaaacctaggaaggttcatgcaaagtggatcctggacaccgacaccttcaatgaatggatgaatgaggaagactatgaagtaaatgatgacaaaaaccctgtctcccgccgaaagaagatttcagccaagacactgacagatgaggtgaacagcccagattcagatcgacgggacaagaaggggggaaactataagaagaggaagcgctccccctctccttcaccaaccccagaagcaaagaagaaaaatgctaagaaaggtccctcaacaccttacactaagtcaaagcgtggccacagagaagaggagcaagaagacctgacaaaggacatggacgagccctcaccagtccccaatgtagaagaggtgacacttcccaaaacagtcaacacaaagaaagactcagagtcggccccagtcaaaggcggcaccatgaccgacctggatgaacaggaagatgaaagcatggagacgacgggcaaggatgaggatgagaacagtacggggaacaagggagagcagaccaagaatccagacctgcatgaggacaatgtgactgaacagacccaccacatcatcattcccagctacgctgcctggtttgactacaatagtgttcatgccattgagcggagggctctccccgagttcttcaacggcaagaacaagtccaagactccagagatctacctggcctatcgaaactttatgattgacacttaccgactgaacccccaagagtatcttacctctaccgcctgccgccgaaacctagcgggtgatgtctgtgccatcatgagggtccatgccttcctagaacagtggggtcttattaactaccaggtggatgctgagagtcgaccaaccccaatggggcctccgcctacctctcacttccatgtcttggctgacacaccatcagggctggtgcctctgcagcccaagacacctcagggccgccaggttgatgctgataccaaggctgggcgaaagggcaaagagctggatgacctggtgccagagacggctaagggcaagccagagctgcagacctctgcttcccaacaaatgctcaactttcctgacaaaggcaaagagaaaccaacagacatgcaaaactttgggctgcgcacagacatgtacacaaaaaagaatgttccctccaagagcaaggctgcagccagtgccactcgtgagtggacagaacaggaaaccctgcttctcctggaggcactggaaatgtacaaagatgactggaacaaagtgtccgagcatgtgggaagccgcacacaggacgagtgcatcttgcattttcttcgtcttcccattgaagacccatacctggaggactcagaggcctccctaggccccctggcctaccaacccatccccttcagtcagtcgggcaaccctgttatgagcactgttgccttcctggcctctgtcgtcgatccccgagtcgcctctgctgctgcaaagtcagccctagaggagttctccaaaatgaaggaagaggtacccacggccttggtggaggcccatgttcgaaaagtggaagaagcagccaaagtaacaggcaaggcggaccctgccttcggtctggaaagcagtggcattgcaggaaccacctctgatgagcctgagcggattgaggagagcgggaatgacgaggctcgggtggaaggccaggccacagatgagaagaaggagcccaaggaaccccgagaaggagggggtgctatagaggaggaagcaaaagagaaaaccagcgaggctcccaagaaggatgaggagaaagggaaagaaggcgacagtgagaaggagtccgagaagagtgatggagacccaatagtcgatcctgagaaggagaaggagccaaaggaagggcaggaggaagtgctgaaggaagtggtggagtctgagggggaaaggaagacaaaggtggagcgggacattggcgagggcaacctctccaccgctgctgccgccgccctggccgccgccgcagtgaaagctaagcacttggctgctgttgaggaaaggaagatcaaatctttggtggccctgctggtggagacccagatgaaaaagttggagatcaaacttcggcactttgaggagctggagactatcatggaccgggagcgagaagcactggagtatcagaggcagcagctcctggccgacagacaagccttccacatggagcagctgaagtatgcggagatgagggctcggcagcagcacttccaacagatgcaccaacagcagcagcagccaccaccagccctgcccccaggctcccagcctatccccccaacaggggctgctgggccacccgcagtccatggcttggctgtggctccagcctctgtagtccctgctcctgctggcagtggggcccctccaggaagtttgggcccttctgaacagattgggcaggcagggtcaactgcagggccacagcagcagcaaccagctggagccccccagcctggggcagtcccaccaggggttcccccccctggaccccatggcccctcaccgttccccaaccaacaaactcctccctcaatgatgccaggggcagtgccaggcagcgggcacccaggcgtggcgggtaatgctcctttgggtttgccttttggcatgccgcctcctcctcctcctcctgctccatccatcatcccatttggtagtctagctgactccatcagtattaacctccccgctcctcctaacctgcatgggcatcaccaccatctcccgttcgccccgggcactctccccccacctaacctgcctgtgtccatggcgaaccctctacatcctaacctgccggcgaccaccaccatgccatcttccttgcctctcgggccggggctcggatccgccgcagcccaaagccctgccattgtggcagctgttcagggcaacctcctgcccagtgccagcccactgccagacccaggcacccccctgcctccagaccccacagccccgagcccaggcacggtcacccctgtgccacctccacagtgaggagccagccagacatctctccccctcaccccctgtggacatcacggttccaggaacagcccttcccccaccactgggaccctccccagcctggagagttcatcactacgtaaggaaagctccttccgcccctccaaagccctcaccatgcctaacagaggcatgcatttttatatcagattattcaaggacttctgtttaaaagatgtttataatgtctgggagagaggataggatgggaatgctgccctaaaggaagggctggtgaaaggtgtttatacaaggttctattaaccacttctaagggtacacctccctccaaactactgcattttctatggattaaaaaaaaaaaaaaaaagtagattttaaaaagccacattggagctcccttctacccactaaaaaataaccaatttttacattttttgagggggagtgagttttaggaaaggggaattaagattccagggagagctctggggatagaacagggcgcagattccatctctccccaagcccctttttagtgactaagtcaaggccccaactcccctcccccaccctacgctgagcttattcgagttcattcgtactaataatccctcctgcggcttcctcattgttgctgttttaggccaccccagctcagccaatgattcctttccctctgaatgtcagttttgtttttaaaagtcacttgcttagttgatgtcagcgtatgtgtatttggtggggaaaacctaatttcggggatttctgtggtaggtaataggagaagaaagggcactgggggctgttctccttccttccctgggctgtatccatggactcctggaaggcacagagaagggagctataagaggatgtgaagttttaaaacctgaaattgttttttaaagcacttaagcacctccatattatgacttggtgggtcaccccttagcttcctccctctcccaccaagactatgagaacttcagctgatagctgggggctccccagatgaggatgcagggatttgggagcagtggaagagggtgcccaaccttgggttggaccaacccttggctcgcagctcaactctgcttcccgcattcctgctccacgtgtcccagcttctcccctgtgacgggaaggcaggtgtgactccaggctctgcactggttcttcttggttcctcccaccaggccctttgttcctcatgtccccatgtttctctccctctgcgtcttagcacctttcttctgttcaaagttttctgtaaattttctctttttttctttctttcttttttttttttttataaattaatttgctttcagttccaaaaaaaaaaaaaaaaaaa

SEQ ID NO: 71 - protein, 1245 aa, Homo sapiens
MAVRKKDGGPNVKYYEAADTVTQFDNVRLWLGKNYKKYIQAEPPTNKSLSSLVVQLLQFQEEVFGKHVSNAPLTKLPIKCFLDFKAGGSLCHILAAAYKFKSDQGWRRYDFQNPSRMDRNVEMFMTIEKSLVQNNCLSRPNIFLCPEIEPKLLGKLKDIIKRHQGTVTEDKNNASHVVYPVPGNLEEEEWVRPVMKRDKQVLLHWGYYPDSYDTWIPASEIEASVEDAPTPEKPRKVHAKWILDTDTFNEWMNEEDYEVNDDKNPVSRRKKISAKTLTDEVNSPDSDRRDKKGGNYKKRKRSPSPSPTPEAKKKNAKKGPSTPYTKSKRGHREEEQEDLTKDMDEPSPVPNVEEVTLPKTVNTKKDSESAPVKGGTMTDLDEQEDESMETTGKDEDENSTGNKGEQTKNPDLHEDNVTEQTHHIIIPSYAAWFDYNSVHAIERRALPEFFNGKNKSKTPEIYLAYRNFMIDTYRLNPQEYLTSTACRRNLAGDVCAIMRVHAFLEQWGLINYQVDAESRPTPMGPPPTSHFHVLADTPSGLVPLQPKTPQGRQVDADTKAGRKGKELDDLVPETAKGKPELQTSASQQMLNFPDKGKEKPTDMQNFGLRTDMYTKKNVPSKSKAAASATREWTEQETLLLLEALEMYKDDWNKVSEHVGSRTQDECILHFLRLPIEDPYLEDSEASLGPLAYQPIPFSQSGNPVMSTVAFLASVVDPRVASAAAKSALEEFSKMKEEVPTALVEAHVRKVEEAAKVTGKADPAFGLESSGIAGTTSDEPERIEESGNDEARVEGQATDEKKEPKEPREGGGAIEEEAKEKTSEAPKKDEEKGKEGDSEKESEKSDGDPIVDPEKEKEPKEGQEEVLKEVVESEGERKTKVERDIGEGNLSTAAAAALAAAAVKAKHLAAVEERKIKSLVALLVETQMKKLEIKLRHFEELETIMDREREALEYQRQQLLADRQAFHMEQLKYAEMRARQQHFQQMHQQQQQPPPALPPGSQPIPPTGAAGPPAVHGLAVAPASVVPAPAGSGAPPGSLGPSEQIGQAGSTAGPQQQQPAGAPQPGAVPPGVPPPGPHGPSPFPNQQTPPSMMPGAVPGSGHPGVAGNAPLGLPFGMPPPPPPPAPSIIPFGSLADSISINLPAPPNLHGHHHHLPFAPGTLPPPNLPVSMANPLHPNLPATTTMPSSLPLGPGLGSAAAQSPAIVAAVQGNLLPSASPLPDPGTPLPPDPTAPSPGTVTPVPPPQ

SEQ ID NO: 72 - DNA, 4964 bp, Mus musculus
gtggcggcgggaggcggcgggaggcgggcggaggaggaggcgggagctgagctgagcggggcgggcggcggcggggcccgagcccgagaagatggcggtgcggaagaaggacggcggccccaacgtgaagtactacgaggccgcggacaccgtgacccagttcgacaacgtgcggctctggctcggcaagaactacaagaagtacatacaagcagaaccgccaaccaacaagtctctgtccagcctggtggtgcagttgctccagtttcaggaagaggtttttggcaaacatgtcagcaacgcaccgcttactaaactgccgatcaaatgtttcctagatttcaaagcaggaggatccctctgccatattcttgcagctgcctacaaattcaagagtgaccagggatggcggcgttacgatttccagaatccatcacgcatggaccgcaatgtggaaatgttcatgaccattgagaagtccttggtacagaataattgcctgtcacgacctaacattttcctctgcccagaaattgagcccaaactgctagggaaattaaaagacattgttaagagacaccagggaaccatctctgaggataagagcaatgcctcccatgttgtgtatcctgtcccagggaacctagaagaagaggaatgggtacggccagtcatgaagagggataaacaggttcttctgcactggggctactatcctgacagctacgacacgtggatcccagcgagtgaaattgaagcatctgtggaggacgctcccactcctgagaaaccgaggaaggtccatgcgaagtggatcctcgacaccgacacattcaacgagtggatgaatgaggaagactacgaagtcagtgacgacaaaagcccagtctcccgcaggaagaagatctcagccaagacgctgacagacgaggtaaacagcccagattcagacagacgagacaagaaggggggcaactataagaagaggaagcgctctccctctccttcacccaccccagaggctaagaagaaaaacgctaagaaaggaccctcaacaccttataccaagtcaaagcgaggccacagagaagaggaacaagaagacctgacaaaagacatggatgagccctctccagtcccaaacgtggaagaggtgacactccccaaaacagtcaacactaaaaaggactctgagtcagccccagtcaaaggcggcaccatgactgacctggatgaacaggacgatgaaagcatggagaccaccggcaaggacgaggatgagaacagcacgggcaacaaaggcgagcagacgaagaacccggacctgcatgaggacaatgtgaccgagcagacccaccacatcatcatccccagctacgccgcctggtttgactacaacagcgtccatgccattgaacggagggctcttcctgagttcttcaacggcaagaacaagtctaagactccagagatctacctggcgtatcggaacttcatgattgacacttaccgactgaatccccaggagtatctaacatctactgcctgtcggcggaatttggcgggtgatgtctgcgctatcatgagggtccatgccttcctggaacagtggggtcttattaactaccaggtagatgctgagagccgaccaaccccaatggggcctccacccacctctcacttccatgtcttggcggacacaccatcagggctggttcctcttcagccgaagcctccacagcagagctctgcttcccagcaaatgctgaacttccctgagaagggcaaggagaaaccagcagacatgcagaattttgggctgcgcacagacatgtacacaaagaagaacgtcccctccaagagcaaagctgcagcaagtgccactcgggaatggacggagcaggagactctgctgctcctggaggctttggaaatgtacaaggacgactggaacaaagtatctgagcacgtgggaagccgcacgcaggacgagtgcatcttgcattttctccgccttcccattgaagacccatacctggaggactcggaggcttctctaggccctctggcctaccaacccatccccttcagtcagtcaggcaaccctgttatgagcaccgttgccttcctggcctctgtcgtcgatccccgagttgcctctgctgctgcgaagtcagccctagaagagttctcaaaaatgaaggaagaggtgcccacagctttggtggaagcccacgtgcgtaaggtcgaagaagcggccaaagtcacaggcaaggccgacccagcctttggtctggagagtagcggcatcgcagggactgcctctgatgagcctgagcgcattgaggaaagcgggactgaggaggcacggccagagggccaggcagcagatgagaagaaggagcctaaggaaccacgggaaggagggggcgctgtggaggaagaagcaaaggaggaaataagtgaggtccccaagaaagatgaagagaaagggaaagaaggtgacagtgagaaggagtctgagaagagtgacggggacccgatagttgatcctgagaaagacaaggaaccaacagaagggcaggaggaagtgctaaaggaagtggcagagccagagggggagaggaaaaccaaggtggagcgtgacattggtgaaggcaacctgtccacagctgcagccgcagccctggccgctgctgcagtcaaggccaagcacttggctgcagttgaggagagaaagatcaagtctttggtggctctgctggtagagacccaaatgaagaaactagagatcaaactccgacattttgaggagctggagacaataatggaccgggagcgagaggcgctggaataccagaggcagcagctcctggccgaccggcaagccttccacatggagcagctgaagtatgcagagatgagggcccggcagcagcacttccagcagatgcaccagcagcagcagcagcagccaccaaccttgcccccaggctcccagcccatacctcccaccggggctgctggaccacctacagtccatggtctagctgtgcctccagccgctgtggcctctgcccctcctggcagtggggcccctcctggaagcttgggcccttctgaacagattgggcaggcagggacaactgcagggccacagcagccacaacaagctggagcccctcagcctggggcagtcccaccaggggtacccccccctggaccccatggcccctcaccgttccccaaccaaccaactcctccctcaatgatgccaggggcagtgccaggcagcgggcacccaggcgtggcgggtaatgctcctttgggtttgccttttggcatgccgcctcctcctcctgctgctccatccgtcatcccattcggtagtctagctgactccattagtattaaccttccccctcctcctaacctgcatgggcatcaccaccatctcccgtttgccccgggcactatccccccacctaacctgcctgtgtccatggcgaaccctctacatcctaacctgccggcgaccaccaccatgccatcttccttgcctctcgggccggggctcggatccgccgcagcccagagccctgccattgtggcagctgttcagggcaacctcctgcccagtgccagcccactgccagacccaggcaccccgctgcctccagaccccacagctccaagcccaggcacagtcacccctgtgccacctccacagtgaggaaccagccagccatctctccccctcactccccatggagatcacagttccaggaacagccctcccccactactgggaccctccctcagcctgaagagttcatcactacgtaaggaaagctcctcctgccccctcaccacccccaccatgcccagcagaggtgtgcagttttatatccaattattatccacggacttctgactaaaagatgtttctaatgcctgggagagagaataggagggaaagatgtttatacgaggttctactaactggttctgagggtctaccccttcagaattactgcatttttgaagtgataacatgaaaatgaaaccctttaaaagggaggttttaaaaaaagacacttcggagcccacaaaaaaagaacttttttaattattattattattattttgaggggaaagggcaggttttaagaggaattaaatttctggggcaaggtgtgaggtggaatagggcaccgagcctgtctccctgagcccttggcagtgctgagtcagctcccctcacccattccagtttattcatacaaatccctcctgctgctcgtcatggttgctgttttaggcccagttcagccaatgaccttttcctccagtcagctttgtgtttgtgtttaagtcacctgcttactcgtcagcgtctgtgtacttgtgggaaatgtagttttcggggattctgtggtaggaaatagaggaagaaggggcctcagttgggctcttcttcctgctttcctagttgtatctgtgagtgcccaacaggcatcagagggggagctctaagaggatggggggcctgcagaccctcaagtttgaaaagcacttaagcacctacttttgacagtgggacagtctgctaacttctgcccccaccaaccaagcctgacagaacccagtgatagctaggagttccccaaatgaggacaaagatttgggagcagtgcagcgtgcctctgcactccaggtcttcctcttcaccccctacttggaggcagacacaattccaggccgcaccagagcctggcccctcccaccaggcgctttgctccttctgtcccagcgtctccttcctctgcatctccacacctttcttctgttcaaagtcttctgtaaaattttctttccttctttgttcttttctttttccttttttttttataaattaatttgctttcagttccaaaaaaaaaaaaaaaaaaaaaaaaaaaaaa

SEQ ID NO: 73 - protein, 1213 aa, Mus musculus
MAVRKKDGGPNVKYYEAADTVTQFDNVRLWLGKNYKKYIQAEPPTNKSLSSLVVQLLQFQEEVFGKHVSNAPLTKLPIKCFLDFKAGGSLCHILAAAYKFKSDQGWRRYDFQNPSRMDRNVEMFMTIEKSLVQNNCLSRPNIFLCPEIEPKLLGKLKDIVKRHQGTISEDKSNASHVVYPVPGNLEEEEWVRPVMKRDKQVLLHWGYYPDSYDTWIPASEIEASVEDAPTPEKPRKVHAKWILDTDTFNEWMNEEDYEVSDDKSPVSRRKKISAKTLTDEVNSPDSDRRDKKGGNYKKRKRSPSPSPTPEAKKKNAKKGPSTPYTKSKRGHREEEQEDLTKDMDEPSPVPNVEEVTLPKTVNTKKDSESAPVKGGTMTDLDEQDDESMETTGKDEDENSTGNKGEQTKNPDLHEDNVTEQTHHIIIPSYAAWFDYNSVHAIERRALPEFFNGKNKSKTPEIYLAYRNFMIDTYRLNPQEYLTSTACRRNLAGDVCAIMRVHAFLEQWGLINYQVDAESRPTPMGPPPTSHFHVLADTPSGLVPLQPKPPQQSSASQQMLNFPEKGKEKPADMQNFGLRTDMYTKKNVPSKSKAAASATREWTEQETLLLLEALEMYKDDWNKVSEHVGSRTQDECILHFLRLPIEDPYLEDSEASLGPLAYQPIPFSQSGNPVMSTVAFLASVVDPRVASAAAKSALEEFSKMKEEVPTALVEAHVRKVEEAAKVTGKADPAFGLESSGIAGTASDEPERIEESGTEEARPEGQAADEKKEPKEPREGGGAVEEEAKEEISEVPKKDEEKGKEGDSEKESEKSDGDPIVDPEKDKEPTEGQEEVLKEVAEPEGERKTKVERDIGEGNLSTAAAAALAAAAVKAKHLAAVEERKIKSLVALLVETQMKKLEIKLRHFEELETIMDREREALEYQRQQLLADRQAFHMEQLKYAEMRARQQHFQQMHQQQQQQPPTLPPGSQPIPPTGAAGPPTVHGLAVPPAAVASAPPGSGAPPGSLGPSEQIGQAGTTAGPQQPQQAGAPQPGAVPPGVPPPGPHGPSPFPNQPTPPSMMPGAVPGSGHPGVAGNAPLGLPFGMPPPPPAAPSVIPFGSLADSISINLPPPPNLHGHHHHLPFAPGTIPPPNLPVSMANPLHPNLPATTTMPSSLPLGPGLGSAAAQSPAIVAAVQGNLLPSASPLPDPGTPLPPDPTAPSPGTVTPVPPPQ

SEQ ID NO: 74 - DNA, 4715 bp, Mus musculus
gtggcggcgggaggcggcgggaggcgggcggaggaggaggcgggagctgagctgagcggggcgggcggcggcggggcccgagcccgagaagatggcggtgcggaagaaggacggcggccccaacgtgaagtactacgaggccgcggacaccgtgacccagttcgacaacgtgcggctctggctcggcaagaactacaagaagtacatacaagcagaaccgccaaccaacaagtctctgtccagcctggtggtgcagttgctccagtttcaggaagaggtttttggcaaacatgtcagcaacgcaccgcttactaaactgccgatcaaatgtttcctagatttcaaagcaggaggatccctctgccatattcttgcagctgcctacaaattcaagagtgaccagggatggcggcgttacgatttccagaatccatcacgcatggaccgcaatgtggaaatgttcatgaccattgagaagtccttggtacagaataattgcctgtcacgacctaacattttcctctgcccagaaattgagcccaaactgctagggaaattaaaagacattgttaagagacaccagggaaccatctctgaggataagagcaatgcctcccatgttgtgtatcctgtcccagggaacctagaagaagaggaatgggtacggccagtcatgaagagggataaacaggttcttctgcactggggctactatcctgacagctacgacacgtggatcccagcgagtgaaattgaagcatctgtggaggacgctcccactcctgagaaaccgaggaaggtccatgcgaagtggatcctcgacaccgacacattcaacgagtggatgaatgaggaagactacgaagtcagtgacgacaaaagcccagtctcccgcaggaagaagatctcagccaagacgctgacagacgaggtaaacagcccagattcagacagacgagacaagaaggggggcaactataagaagaggaagcgctctccctctccttcacccaccccagaggctaagaagaaaaacgctaagaaaggaccctcaacaccttataccaagtcaaagcgaggccacagagaagaggaacaagaagacctgacaaaagacatggatgagccctctccagtcccaaacgtggaagaggtgacactccccaaaacagtcaacactaaaaaggactctgagtcagccccagtcaaaggcggcaccatgactgacctggatgaacaggacgatgaaagcatggagaccaccggcaaggacgaggatgagaacagcacgggcaacaaaggcgagcagacgaagaacccggacctgcatgaggacaatgtgaccgagcagacccaccacatcatcatccccagctacgccgcctggtttgactacaacagcgtccatgccattgaacggagggctcttcctgagttcttcaacggcaagaacaagtctaagactccagagatctacctggcgtatcggaacttcatgattgacacttaccgactgaatccccaggagtatctaacatctactgcctgtcggcggaatttggcgggtgatgtctgcgctatcatgagggtccatgccttcctggaacagtggggtcttattaactaccaggtagatgctgagagccgaccaaccccaatggggcctccacccacctctcacttccatgtcttggcggacacaccatcagggctggttcctcttcagccgaagcctccacagggccgccaggttgatgctgacaccaaggctgggcggaagggcaaagagctggatgacctggtgccagagacggctaagggcaagccagagctgcagagctctgcttcccagcaaatgctgaacttccctgagaagggcaaggagaaaccagcagacatgcagaattttgggctgcgcacagacatgtacacaaagaagaacgtcccctccaagagcaaagctgcagcaagtgccactcgggaatggacggagcaggagactctgctgctcctggaggctttggaaatgtacaaggacgactggaacaaagtatctgagcacgtgggaagccgcacgcaggacgagtgcatcttgcattttctccgccttcccattgaagacccatacctggaggactcggaggcttctctaggccctctggcctaccaacccatccccttcagtcagtcaggcaaccctgttatgagcaccgttgccttcctggcctctgtcgtcgatccccgagttgcctctgctgctgcgaagtcagccctagaagagttctcaaaaatgaaggaagaggtgcccacagctttggtggaagcccacgtgcgtaaggtcgaagaagcggccaaagtcacaggcaaggccgacccagcctttggtctggagagtagcggcatcgcagggactgcctctgatgagcctgagcgcattgaggaaagcgggactgaggaggcacggccagagggccaggcagcagatgagaagaaggagcctaaggaaccacgggaaggagggggcgctgtggaggaagaagcaaaggaggaaataagtgaggtccccaagaaagatgaagagaaagggaaagaaggtgacagtgagaaggagtctgagaagagtgacggggacccgatagttgatcctgagaaagacaaggaaccaacagaagggcaggaggaagtgctaaaggaagtggcagagccagagggggagaggaaaaccaaggtggagcgtgacattggtgaaggcaacctgtccacagctgcagccgcagccctggccgctgctgcagtcaaggccaagcacttggctgcagttgaggagagaaagatcaagtctttggtggctctgctggtagagacccaaatgaagaaactagagatcaaactccgacattttgaggagctggagacaataatggaccgggagcgagaggcgctggaataccagaggcagcagctcctggccgaccggcaagccttccacatggagcagctgaagtatgcagagatgagggcccggcagcagcacttccagcagatgcaccagcagcagcagcagcagccaccaaccttgcccccaggctcccagcccatacctcccaccggggctgctggaccacctacagtccatggtctagctgtgcctccagccgctgtggcctctgcccctcctggcagtggggcccctcctggaagcttgggcccttctgaacagattgggcaggcagggacaactgcagggccacagcagccacaacaagctggagcccctcagcctggggcagtcccaccaggggtacccccccctggaccccatggcccctcaccgttccccaaccaaccaactcctccctcaatgatgccaggggcagtgccaggcagcgggcacccaggcgtggcggacccaggcaccccgctgcctccagaccccacagctccaagcccaggcacagtcacccctgtgccacctccacagtgaggaaccagccagccatctctccccctcactccccatggagatcacagttccaggaacagccctcccccactactgggaccctccctcagcctgaagagttcatcactacgtaaggaaagctcctcctgccccctcaccacccccaccatgcccagcagaggtgtgcagttttatatccaattattatccacggacttctgactaaaagatgtttctaatgcctgggagagagaataggagggaaagatgtttatacgaggttctactaactggttctgagggtctaccccttcagaattactgcatttttgaagtgataacatgaaaatgaaaccctttaaaagggaggttttaaaaaaagacacttcggagcccacaaaaaaagaacttttttaattattattattattattttgaggggaaagggcaggttttaagaggaattaaatttctggggcaaggtgtgaggtggaatagggcaccgagcctgtctccctgagcccttggcagtgctgagtcagctcccctcacccattccagtttattcatacaaatccctcctgctgctcgtcatggttgctgttttaggcccagttcagccaatgaccttttcctccagtcagctttgtgtttgtgtttaagtcacctgcttactcgtcagcgtctgtgtacttgtgggaaatgtagttttcggggattctgtggtaggaaatagaggaagaaggggcctcagttgggctcttcttcctgctttcctagttgtatctgtgagtgcccaacaggcatcagagggggagctctaagaggatggggggcctgcagaccctcaagtttgaaaagcacttaagcacctacttttgacagtgggacagtctgctaacttctgcccccaccaaccaagcctgacagaacccagtgatagctaggagttccccaaatgaggacaaagatttgggagcagtgcagcgtgcctctgcactccaggtcttcctcttcaccccctacttggaggcagacacaattccaggccgcaccagagcctggcccctcccaccaggcgctttgctccttctgtcccagcgtctccttcctctgcatctccacacctttcttctgttcaaagtcttctgtaaaattttctttccttctttgttcttttctttttccttttttttttataaattaatttgctttcagttccaaaaaaaaaaaaaaaaaaaaaaaaaaaaaa

SEQ ID NO: 75 - protein, 1130 aa, Mus musculus
MAVRKKDGGPNVKYYEAADTVTQFDNVRLWLGKNYKKYIQAEPPTNKSLSSLVVQLLQFQEEVFGKHVSNAPLTKLPIKCFLDFKAGGSLCHILAAAYKFKSDQGWRRYDFQNPSRMDRNVEMFMTIEKSLVQNNCLSRPNIFLCPEIEPKLLGKLKDIVKRHQGTISEDKSNASHVVYPVPGNLEEEEWVRPVMKRDKQVLLHWGYYPDSYDTWIPASEIEASVEDAPTPEKPRKVHAKWILDTDTFNEWMNEEDYEVSDDKSPVSRRKKISAKTLTDEVNSPDSDRRDKKGGNYKKRKRSPSPSPTPEAKKKNAKKGPSTPYTKSKRGHREEEQEDLTKDMDEPSPVPNVEEVTLPKTVNTKKDSESAPVKGGTMTDLDEQDDESMETTGKDEDENSTGNKGEQTKNPDLHEDNVTEQTHHIIIPSYAAWFDYNSVHAIERRALPEFFNGKNKSKTPEIYLAYRNFMIDTYRLNPQEYLTSTACRRNLAGDVCAIMRVHAFLEQWGLINYQVDAESRPTPMGPPPTSHFHVLADTPSGLVPLQPKPPQGRQVDADTKAGRKGKELDDLVPETAKGKPELQSSASQQMLNFPEKGKEKPADMQNFGLRTDMYTKKNVPSKSKAAASATREWTEQETLLLLEALEMYKDDWNKVSEHVGSRTQDECILHFLRLPIEDPYLEDSEASLGPLAYQPIPFSQSGNPVMSTVAFLASVVDPRVASAAAKSALEEFSKMKEEVPTALVEAHVRKVEEAAKVTGKADPAFGLESSGIAGTASDEPERIEESGTEEARPEGQAADEKKEPKEPREGGGAVEEEAKEEISEVPKKDEEKGKEGDSEKESEKSDGDPIVDPEKDKEPTEGQEEVLKEVAEPEGERKTKVERDIGEGNLSTAAAAALAAAAVKAKHLAAVEERKIKSLVALLVETQMKKLEIKLRHFEELETIMDREREALEYQRQQLLADRQAFHMEQLKYAEMRARQQHFQQMHQQQQQQPPTLPPGSQPIPPTGAAGPPTVHGLAVPPAAVASAPPGSGAPPGSLGPSEQIGQAGTTAGPQQPQQAGAPQPGAVPPGVPPPGPHGPSPFPNQPTPPSMMPGAVPGSGHPGVADPGTPLPPDPTAPSPGTVTPVPPPQ

SEQ ID NO: 76 - DNA, 4622 bp, Mus musculus
gtggcggcgggaggcggcgggaggcgggcggaggaggaggcgggagctgagctgagcggggcgggcggcggcggggcccgagcccgagaagatggcggtgcggaagaaggacggcggccccaacgtgaagtactacgaggccgcggacaccgtgacccagttcgacaacgtgcggctctggctcggcaagaactacaagaagtacatacaagcagaaccgccaaccaacaagtctctgtccagcctggtggtgcagttgctccagtttcaggaagaggtttttggcaaacatgtcagcaacgcaccgcttactaaactgccgatcaaatgtttcctagatttcaaagcaggaggatccctctgccatattcttgcagctgcctacaaattcaagagtgaccagggatggcggcgttacgatttccagaatccatcacgcatggaccgcaatgtggaaatgttcatgaccattgagaagtccttggtacagaataattgcctgtcacgacctaacattttcctctgcccagaaattgagcccaaactgctagggaaattaaaagacattgttaagagacaccagggaaccatctctgaggataagagcaatgcctcccatgttgtgtatcctgtcccagggaacctagaagaagaggaatgggtacggccagtcatgaagagggataaacaggttcttctgcactggggctactatcctgacagctacgacacgtggatcccagcgagtgaaattgaagcatctgtggaggacgctcccactcctgagaaaccgaggaaggtccatgcgaagtggatcctcgacaccgacacattcaacgagtggatgaatgaggaagactacgaagtcagtgacgacaaaagcccagtctcccgcaggaagaagatctcagccaagacgctgacagacgaggtaaacagcccagattcagacagacgagacaagaaggggggcaactataagaagaggaagcgctctccctctccttcacccaccccagaggctaagaagaaaaacgctaagaaaggaccctcaacaccttataccaagtcaaagcgaggccacagagaagaggaacaagaagacctgacaaaagacatggatgagccctctccagtcccaaacgtggaagaggtgacactccccaaaacagtcaacactaaaaaggactctgagtcagccccagtcaaaggcggcaccatgactgacctggatgaacaggacgatgaaagcatggagaccaccggcaaggacgaggatgagaacagcacgggcaacaaaggcgagcagacgaagaacccggacctgcatgaggacaatgtgaccgagcagacccaccacatcatcatccccagctacgccgcctggtttgactacaacagcgtccatgccattgaacggagggctcttcctgagttcttcaacggcaagaacaagtctaagactccagagatctacctggcgtatcggaacttcatgattgacacttaccgactgaatccccaggagtatctaacatctactgcctgtcggcggaatttggcgggtgatgtctgcgctatcatgagggtccatgccttcctggaacagtggggtcttattaactaccaggtagatgctgagagccgaccaaccccaatggggcctccacccacctctcacttccatgtcttggcggacacaccatcagggctggttcctcttcagccgaagcctccacagcagagctctgcttcccagcaaatgctgaacttccctgagaagggcaaggagaaaccagcagacatgcagaattttgggctgcgcacagacatgtacacaaagaagaacgtcccctccaagagcaaagctgcagcaagtgccactcgggaatggacggagcaggagactctgctgctcctggaggctttggaaatgtacaaggacgactggaacaaagtatctgagcacgtgggaagccgcacgcaggacgagtgcatcttgcattttctccgccttcccattgaagacccatacctggaggactcggaggcttctctaggccctctggcctaccaacccatccccttcagtcagtcaggcaaccctgttatgagcaccgttgccttcctggcctctgtcgtcgatccccgagttgcctctgctgctgcgaagtcagccctagaagagttctcaaaaatgaaggaagaggtgcccacagctttggtggaagcccacgtgcgtaaggtcgaagaagcggccaaagtcacaggcaaggccgacccagcctttggtctggagagtagcggcatcgcagggactgcctctgatgagcctgagcgcattgaggaaagcgggactgaggaggcacggccagagggccaggcagcagatgagaagaaggagcctaaggaaccacgggaaggagggggcgctgtggaggaagaagcaaaggaggaaataagtgaggtccccaagaaagatgaagagaaagggaaagaaggtgacagtgagaaggagtctgagaagagtgacggggacccgatagttgatcctgagaaagacaaggaaccaacagaagggcaggaggaagtgctaaaggaagtggcagagccagagggggagaggaaaaccaaggtggagcgtgacattggtgaaggcaacctgtccacagctgcagccgcagccctggccgctgctgcagtcaaggccaagcacttggctgcagttgaggagagaaagatcaagtctttggtggctctgctggtagagacccaaatgaagaaactagagatcaaactccgacattttgaggagctggagacaataatggaccgggagcgagaggcgctggaataccagaggcagcagctcctggccgaccggcaagccttccacatggagcagctgaagtatgcagagatgagggcccggcagcagcacttccagcagatgcaccagcagcagcagcagcagccaccaaccttgcccccaggctcccagcccatacctcccaccggggctgctggaccacctacagtccatggtctagctgtgcctccagccgctgtggcctctgcccctcctggcagtggggcccctcctggaagcttgggcccttctgaacagattgggcaggcagggacaactgcagggccacagcagccacaacaagctggagcccctcagcctggggcagtcccaccaggggtacccccccctggaccccatggcccctcaccgttccccaaccaaccaactcctccctcaatgatgccaggggcagtgccaggcagcgggcacccaggcgtggcggacccaggcaccccgctgcctccagaccccacagctccaagcccaggcacagtcacccctgtgccacctccacagtgaggaaccagccagccatctctccccctcactccccatggagatcacagttccaggaacagccctcccccactactgggaccctccctcagcctgaagagttcatcactacgtaaggaaagctcctcctgccccctcaccacccccaccatgcccagcagaggtgtgcagttttatatccaattattatccacggacttctgactaaaagatgtttctaatgcctgggagagagaataggagggaaagatgtttatacgaggttctactaactggttctgagggtctaccccttcagaattactgcatttttgaagtgataacatgaaaatgaaaccctttaaaagggaggttttaaaaaaagacacttcggagcccacaaaaaaagaacttttttaattattattattattattttgaggggaaagggcaggttttaagaggaattaaatttctggggcaaggtgtgaggtggaatagggcaccgagcctgtctccctgagcccttggcagtgctgagtcagctcccctcacccattccagtttattcatacaaatccctcctgctgctcgtcatggttgctgttttaggcccagttcagccaatgaccttttcctccagtcagctttgtgtttgtgtttaagtcacctgcttactcgtcagcgtctgtgtacttgtgggaaatgtagttttcggggattctgtggtaggaaatagaggaagaaggggcctcagttgggctcttcttcctgctttcctagttgtatctgtgagtgcccaacaggcatcagagggggagctctaagaggatggggggcctgcagaccctcaagtttgaaaagcacttaagcacctacttttgacagtgggacagtctgctaacttctgcccccaccaaccaagcctgacagaacccagtgatagctaggagttccccaaatgaggacaaagatttgggagcagtgcagcgtgcctctgcactccaggtcttcctcttcaccccctacttggaggcagacacaattccaggccgcaccagagcctggcccctcccaccaggcgctttgctccttctgtcccagcgtctccttcctctgcatctccacacctttcttctgttcaaagtcttctgtaaaattttctttccttctttgttcttttctttttccttttttttttataaattaatttgctttcagttccaaaaaaaaaaaaaaaaaaaaaaaaaaaaaa

SEQ ID NO: 77 - protein, 1099 aa, Mus musculus
MAVRKKDGGPNVKYYEAADTVTQFDNVRLWLGKNYKKYIQAEPPTNKSLSSLVVQLLQFQEEVFGKHVSNAPLTKLPIKCFLDFKAGGSLCHILAAAYKFKSDQGWRRYDFQNPSRMDRNVEMFMTIEKSLVQNNCLSRPNIFLCPEIEPKLLGKLKDIVKRHQGTISEDKSNASHVVYPVPGNLEEEEWVRPVMKRDKQVLLHWGYYPDSYDTWIPASEIEASVEDAPTPEKPRKVHAKWILDTDTFNEWMNEEDYEVSDDKSPVSRRKKISAKTLTDEVNSPDSDRRDKKGGNYKKRKRSPSPSPTPEAKKKNAKKGPSTPYTKSKRGHREEEQEDLTKDMDEPSPVPNVEEVTLPKTVNTKKDSESAPVKGGTMTDLDEQDDESMETTGKDEDENSTGNKGEQTKNPDLHEDNVTEQTHHIIIPSYAAWFDYNSVHAIERRALPEFFNGKNKSKTPEIYLAYRNFMIDTYRLNPQEYLTSTACRRNLAGDVCAIMRVHAFLEQWGLINYQVDAESRPTPMGPPPTSHFHVLADTPSGLVPLQPKPPQQSSASQQMLNFPEKGKEKPADMQNFGLRTDMYTKKNVPSKSKAAASATREWTEQETLLLLEALEMYKDDWNKVSEHVGSRTQDECILHFLRLPIEDPYLEDSEASLGPLAYQPIPFSQSGNPVMSTVAFLASVVDPRVASAAAKSALEEFSKMKEEVPTALVEAHVRKVEEAAKVTGKADPAFGLESSGIAGTASDEPERIEESGTEEARPEGQAADEKKEPKEPREGGGAVEEEAKEEISEVPKKDEEKGKEGDSEKESEKSDGDPIVDPEKDKEPTEGQEEVLKEVAEPEGERKTKVERDIGEGNLSTAAAAALAAAAVKAKHLAAVEERKIKSLVALLVETQMKKLEIKLRHFEELETIMDREREALEYQRQQLLADRQAFHMEQLKYAEMRARQQHFQQMHQQQQQQPPTLPPGSQPIPPTGAAGPPTVHGLAVPPAAVASAPPGSGAPPGSLGPSEQIGQAGTTAGPQQPQQAGAPQPGAVPPGVPPPGPHGPSPFPNQPTPPSMMPGAVPGSGHPGVADPGTPLPPDPTAPSPGTVTPVPPPQ

SEQ ID NO: 78 - DNA, 3431 bp, Homo sapiens
agcacgccttttccgctagtcgccccgctctatcccatagtctcgctgccctgagcctcccgtgccggccggccggccgggggaacaggcgggcgctcggggggcgctcggggggcggggggagttccggttccggttctttgtgcggctgcatcggcggctccgggaagatggcggcccgggcgggtttccagtctgtggctccaagcggcggcgccggagcctcaggaggggcgggcgcggctgctgccttgggcccgggcggaactccggggcctcctgtgcgaatgggcccggctccgggtcaagggctgtaccgctccccgatgcccggagcggcctatccgagaccaggtatgttgccaggcagccgaatgacacctcagggaccttccatgggaccccctggctatggggggaacccttcagtccgacctggcctggcccagtcagggatggatcagtcccgcaagagacctgcccctcagcagatccagcaggtccagcagcaggcggtccaaaatcgaaaccacaatgcaaagaaaaagaagatggctgacaaaattctacctcaaaggattcgtgaactggtaccagaatcccaggcctatatggatctcttggcttttgaaaggaaactggaccagactatcatgaggaaacggctagatatccaagaggccttgaaacgtcccatcaagcaaaaacggaagctgcgaattttcatttctaacactttcaatccggctaagtcagatgccgaggatggggaagggacggtggcttcctgggagcttcgggtagaaggacggctcctggaggattcagccttgtccaaatatgatgccactaaacaaaagaggaagttctcttccttttttaagtccttggtgattgaactggacaaagacctgtatgggccagacaaccatctggtagaatggcacaggaccgccactacccaggagaccgatggctttcaggtgaagcggccgggagacgtgaatgtacggtgtactgtcctactgatgctggattaccagcctccccagtttaaattagacccccgcctagctcgactcctgggcatccatacccagactcgtccagtgatcatccaagcactgtggcaatatattaagacacataagctccaggaccctcacgagcgggagtttgtcatctgtgacaagtacctgcagcagatctttgagtctcaacgtatgaagttttcagagatccctcagcggctccatgccttgcttatgccaccagaacctatcatcattaatcatgtcatcagtgttgacccgaatgatcagaaaaagacagcttgttatgacattgatgttgaagtggatgacaccttgaagacccagatgaattcttttctgctgtccactgccagccaacaggagattgctactctagacaacaagatccatgagacaatagaaaccatcaaccagctgaagactcagcgggagttcatgctgagctttgccagagaccctcagggtttcatcaatgactggcttcagtcccagtgcagggacctcaagacaatgactgatgtggtgggtaacccagaggaggagcgccgagctgagttctacttccagccctgggctcaggaggctgtgtgccgatacttctactccaaggtgcagcagagacgacaagaattagagcaagccctgggaatccggaatacatagggcctctcccacagccctgattcgactgcaccaattcttgatttgggccctgtgctgcctgcctcatagtatctgccttggtcttgcttggggcgttccaggggatgctgttggttcaaggacaacaccagaatgaagagggtctcacaagacacctgttatcctcttctttcaccctatctcttcccacccccagcttccctttgccccacaaagttcccatgtgcctgtaccctcccctggtctacataggacctctagatagtgttagagagagaacatgtagtggtaatgagtgcttggaatggattgggcctcaggccaggtggtcttcaaggggaccagctaactgatcctgcccttcagagacccaggagttgggagctttcgctccttctccaagactcaggcctgtgggcactctataagctagttgatcttggctctcctgataacagaatccaatttccttccttccctccacaggtttggaacaaactctcccttcacttgttgccctgtagcactacagaaaccctggttcttgggctccactgagccccaggtcagtccccagccctctgggttggcctgctgtcagtgcttctctcactccttagttggggtccacatcagtattggagttttgttctttattgctccctcccagacactccctgtggctgccctttgtgattccctcagatctgccctaatcccgggcatttgggtgggggaatcttgcctttccctttcagagccccagggatctcatctggggaactgtcattgccagcagaggctgttccttcctgctgtttggagatgtgactcattcattcactcactccaccctgcctctgcatcccttaatggagaaacgggcctaaaaccaaacgggtaaaaagccctgggccatccctgtcttcctgtcccttgtctgcccagttgacacctactggtgacttctagggcactgaggagtgaaagcgcctagggctggagaatagcgctgagttgggtttgtgactcttccctctccctgcctcacaggattgtgactccccagcccctgccctcaaagcttcagacccctcaggtagcagcaggaccttgtgatcttggccccttggatctgagatggtttttgcatctttccaggagagcctcacattcttcttccaggttgtatcacccccgagttagcatatcccaggctcgcagactcaacacagcaagggtgggagacagctgggcacaaagggggaattccgttcagcatgggctctaaacccacagaactgacaaagcccctgcttccccaccccctcctcaggctcctgcgagcacacccccacccccaaatccctccctgttctacactggggacagcagaattttctccccgtcttccccttcctgccattttccctcccttgaaaggttgacactggacaaccttggggcagctgagccctggccgcctcctggctggaaccatgagaaggaagctcagtacttcccacagtgtccctgttgataactgtttttattaactgaattgtttttttcatggaccaaacttttttttgtactgtccccttattgatgttacccagttttaataaaagaatcttctgaaggatgggtcctcctacctactgtgagagagctcttccctgagctcttcttccttcaataccattagccaaa

SEQ ID NO: 79 - protein, 515 aa, Homo sapiens
MAARAGFQSVAPSGGAGASGGAGAAAALGPGGTPGPPVRMGPAPGQGLYRSPMPGAAYPRPGMLPGSRMTPQGPSMGPPGYGGNPSVRPGLAQSGMDQSRKRPAPQQIQQVQQQAVQNRNHNAKKKKMADKILPQRIRELVPESQAYMDLLAFERKLDQTIMRKRLDIQEALKRPIKQKRKLRIFISNTFNPAKSDAEDGEGTVASWELRVEGRLLEDSALSKYDATKQKRKFSSFFKSLVIELDKDLYGPDNHLVEWHRTATTQETDGFQVKRPGDVNVRCTVLLMLDYQPPQFKLDPRLARLLGIHTQTRPVIIQALWQYIKTHKLQDPHEREFVICDKYLQQIFESQRMKFSEIPQRLHALLMPPEPIIINHVISVDPNDQKKTACYDIDVEVDDTLKTQMNSFLLSTASQQEIATLDNKIHETIETINQLKTQREFMLSFARDPQGFINDWLQSQCRDLKTMTDVVGNPEEERRAEFYFQPWAQEAVCRYFYSKVQQRRQELEQALGIRNT

SEQ ID NO: 80 - DNA, 3308 bp, Homo sapiens
agcacgccttttccgctagtcgccccgctctatcccatagtctcgctgccctgagcctcccgtgccggccggccggccgggggaacaggcgggcgctcggggggcgctcggggggcggggggagttccggttccggttctttgtgcggctgcatcggcggctccgggaagatggcggcccgggcgggtttccagtctgtggctccaagcggcggcgccggagcctcaggaggggcgggcgcggctgctgccttgggcccgggcggaactccggggcctcctgtgcgaatgggcccggctccgggtcaagggctgtaccgctccccgatgcccggagcggcctatccgagaccaggtatgttgccaggcagccgaatgacacctcagggaccttccatgggaccccctggctatggggggaacccttcagtccgacctggcctggcccagtcagggatggatcagtcccgcaagagacctgcccctcagcagatccagcaggtccagcagcaggcggtccaaaatcgaaaccacaatgcaaagaaaaagaagatggctgacaaaattctacctcaaaggattcgtgaactggtaccagaatcccaggcctatatggatctcttggcttttgaaaggaaactggaccagactatcatgaggaaacggctagatatccaagaggccttgaaacgtcccatcaagcaaaaacggaagctgcgaattttcatttctaacactttcaatccggctaagtcagatgccgaggatggggaagggacggtggcttcctgggagcttcgggtagaaggacggctcctggaggattcagccttgtccaaatatgatgccactaaacaaaagaggaagttctcttccttttttaagtccttggtgattgaactggacaaagacctgtatgggccagacaaccatctggtagaatggcacaggaccgccactacccaggagaccgatggctttcaggtgaagcggccgggagacgtgaatgtacggtgtactgtcctactgatgctggattaccagcctccccagtttaaattagacccccgcctagctcgactcctgggcatccatacccagactcgtccagtgatcatccaagcactgtggcaatatattaagacacataagctccaggaccctcacgagcgggagtttgtcatctgtgacaagtacctgcagcagatctttgagtctcaacgtatgaagttttcagagatccctcagcggctccatgccttgcttatgccaccagaacctatcatcattaatcatgtcatcagtgttgacccgaatgatcagaaaaagacagcttgttatgacattgatgttgaagtggatgacaccttgaagacccagatgaattcttttctgctgtccactgccagccaacaggagattgctactctagacaacaagacaatgactgatgtggtgggtaacccagaggaggagcgccgagctgagttctacttccagccctgggctcaggaggctgtgtgccgatacttctactccaaggtgcagcagagacgacaagaattagagcaagccctgggaatccggaatacatagggcctctcccacagccctgattcgactgcaccaattcttgatttgggccctgtgctgcctgcctcatagtatctgccttggtcttgcttggggcgttccaggggatgctgttggttcaaggacaacaccagaatgaagagggtctcacaagacacctgttatcctcttctttcaccctatctcttcccacccccagcttccctttgccccacaaagttcccatgtgcctgtaccctcccctggtctacataggacctctagatagtgttagagagagaacatgtagtggtaatgagtgcttggaatggattgggcctcaggccaggtggtcttcaaggggaccagctaactgatcctgcccttcagagacccaggagttgggagctttcgctccttctccaagactcaggcctgtgggcactctataagctagttgatcttggctctcctgataacagaatccaatttccttccttccctccacaggtttggaacaaactctcccttcacttgttgccctgtagcactacagaaaccctggttcttgggctccactgagccccaggtcagtccccagccctctgggttggcctgctgtcagtgcttctctcactccttagttggggtccacatcagtattggagttttgttctttattgctccctcccagacactccctgtggctgccctttgtgattccctcagatctgccctaatcccgggcatttgggtgggggaatcttgcctttccctttcagagccccagggatctcatctggggaactgtcattgccagcagaggctgttccttcctgctgtttggagatgtgactcattcattcactcactccaccctgcctctgcatcccttaatggagaaacgggcctaaaaccaaacgggtaaaaagccctgggccatccctgtcttcctgtcccttgtctgcccagttgacacctactggtgacttctagggcactgaggagtgaaagcgcctagggctggagaatagcgctgagttgggtttgtgactcttccctctccctgcctcacaggattgtgactccccagcccctgccctcaaagcttcagacccctcaggtagcagcaggaccttgtgatcttggccccttggatctgagatggtttttgcatctttccaggagagcctcacattcttcttccaggttgtatcacccccgagttagcatatcccaggctcgcagactcaacacagcaagggtgggagacagctgggcacaaagggggaattccgttcagcatgggctctaaacccacagaactgacaaagcccctgcttccccaccccctcctcaggctcctgcgagcacacccccacccccaaatccctccctgttctacactggggacagcagaattttctccccgtcttccccttcctgccattttccctcccttgaaaggttgacactggacaaccttggggcagctgagccctggccgcctcctggctggaaccatgagaaggaagctcagtacttcccacagtgtccctgttgataactgtttttattaactgaattgtttttttcatggaccaaacttttttttgtactgtccccttattgatgttacccagttttaataaaagaatcttctgaaggatgggtcctcctacctactgtgagagagctcttccctgagctcttcttccttcaataccattagccaaa

SEQ ID NO: 81 - protein, 474 aa, Homo sapiens
MAARAGFQSVAPSGGAGASGGAGAAAALGPGGTPGPPVRMGPAPGQGLYRSPMPGAAYPRPGMLPGSRMTPQGPSMGPPGYGGNPSVRPGLAQSGMDQSRKRPAPQQIQQVQQQAVQNRNHNAKKKKMADKILPQRIRELVPESQAYMDLLAFERKLDQTIMRKRLDIQEALKRPIKQKRKLRIFISNTFNPAKSDAEDGEGTVASWELRVEGRLLEDSALSKYDATKQKRKFSSFFKSLVIELDKDLYGPDNHLVEWHRTATTQETDGFQVKRPGDVNVRCTVLLMLDYQPPQFKLDPRLARLLGIHTQTRPVIIQALWQYIKTHKLQDPHEREFVICDKYLQQIFESQRMKFSEIPQRLHALLMPPEPIIINHVISVDPNDQKKTACYDIDVEVDDTLKTQMNSFLLSTASQQEIATLDNKTMTDVVGNPEEERRAEFYFQPWAQEAVCRYFYSKVQQRRQELEQALGIRNT

SEQ ID NO: 82 - DNA, 3153 bp, Mus musculus
gttctttgtgcagctgcagcggcggctccgggaagatggcggcccgggcgggtttccagtctgtggctccgagcggcggcgcgggagcctcaggaggagcgggcgtggcggctgctctgggcccgggcggaactcccgggcctcccgtgcgaatgggcccggcgccgggtcaagggctgtaccgctctccgatgcccggggcggcctatccgagaccaggtatgctgccaggtagccgaatgacacctcagggaccttccatgggacctcctggctatggggggaacccttcagtccgacctggtctggcccagtcagggatggaccagtcccgcaagagacctgcacctcaacagatccagcaggtccagcagcaggcggtccaaaatcgaaatcacaatgcaaagaaaaagaagatggctgacaaaatcctacctcaaaggattcgggaactggtcccagaatcacaggcctacatggatctcctggcttttgaaaggaaactggaccagactattatgaggaagcggctagatatccaggaggccttgaaacgtcccatcaagcaaaaacggaagctgcgaattttcatttctaacacgttcaatccggctaagtcggacgcggaggatggggaagggacggtggcttcctgggagctccgggtagaaggccggctcctggaggacgcggccttgtccaaatatgacgccaccaagcaaaagagaaagttctcttccttttttaagtccttggtgatcgaactggacaaagacctctatggcccagacaaccatctggtagaatggcacaggaccgccactacccaggagaccgatggcttccaggtgaagcggccaggagatgtgaatgtacggtgtactgtcctgctgatgctggactaccagcccccccagtttaaattagaccctcgcctggctcggctcttgggcatccatacccagacacgtccagtgatcatccaagcactgtggcagtatattaaaacacacaagctccaggaccctcacgagcgagagtttgttctctgtgacaagtacctccagcagatctttgaatctcagcggatgaagttctcagagatccctcagcggctccacgccttgcttatgccaccagagcccatcatcatcaatcatgtcatcagtgtggacccaaatgaccagaaaaagaccgcgtgctatgacattgacgtggaggtggatgacactctgaagacccagatgaactctttcctgttgtccactgccagccagcaggagatcgccactctagacaacaagatccatgagacgatagagaccatcaaccagctgaagacccagcgagagttcatgttgagctttgcccgagaccctcagggtttcatcaatgattggcttcagtcccagtgcagggacctcaagacgatgactgatgtggtgggtaacccggaagaggagcgtcgtgctgagttctacttccagccctgggctcaggaggctgtgtgccgatacttctactccaaggtgcagcagaggcggcaagagttagagcaagccctgggaatccgaaacacatagggcctctgtggccctagcctggctgcaccgattccttgggccctgtgctgcctgcctcagtgtacctgtcttggtcttgcttgaggcattccaggggacttggcttcaggacagtgtcacaatgaagagggtgtcacatttctgtctcacagtcacctgttatcccgtcctgtaccccagtcgtcccccgtcccgtcgtgtccccccctcaccccaccccgcctcagctcctccccatcaggctcctgtgtgcctctacctccctatcctacataggacctctagatagtgttagagaaccacagagtgggggcctcctgaggtcaggtggtcttgagggagaccagctacactgatcctgcccttgtcaggagacctaggccttgggagctatccctgtctgagcctcaggcctagggcagtctgtaagctagctgaccttggccctcccggtagcttgacttcttccctcccctccgcaggttggggcagaggctcctttacctctggcagtaaaggagcctgggcttcactgagccccgggttggtcccctgccctctggacttaacctgctgtctcagtgtcctctgaccccttaggggtccatgtcagtattggagtgtgtgttgaattgttgctccctcccacacactcccgtagccgcccagtttaggatttccctacacctgccctaacccacgcttttgggttggggatcttgcctttccttgtcattcccagcagagactgttccttcctgctgttagaggagtggcttgtttattcactccaccctgccccctcctgtaaatggagaaacaggcctgaaatcaaacgggtaaagccctaggccatccctgtcttcctgtcccatgtctgcccagttgaatcccactggtggcttcccgggcactgaggagtaaaagcgcctagggctggagaataggtctgaaatgggtttgtgactccccaccccctgccctgccctcaaagcttcagacccctcagggagcagcaggatgtgggatcgaggccccttgggacagatgctttgaatcttccagggaagcctccgattcttccaggtttgtcacccggagttagcatgtcccaggctcgcagacaacactgcagggtgggagacagctgggcacagggggattctgttgagcatgggctctgaacccacagaactgacaaagcccctgcttccccacccccacctcaggctcctgcgagcagtgctcctgcacccttcccagcctgttctgtactggggacagcagtcttctccctgtcctcccatgtcctatatccacccctccccttggaaggtcctccccacagtgacactggacagccctggggcagctgagccccagcctggcttctggctggaagcgcgatgaggagacttagcactccacagtgtccctggtggtaactgttcttattaactgattgtgttttgttttgttttgttttgttttcatggaccaaaattttttttgtactgtctccttaactgatgtcacccagttttaataaaagacttctaaagagcaggtc

SEQ ID NO: 83 - protein, 515 aa, Mus musculus
MAARAGFQSVAPSGGAGASGGAGVAAALGPGGTPGPPVRMGPAPGQGLYRSPMPGAAYPRPGMLPGSRMTPQGPSMGPPGYGGNPSVRPGLAQSGMDQSRKRPAPQQIQQVQQQAVQNRNHNAKKKKMADKILPQRIRELVPESQAYMDLLAFERKLDQTIMRKRLDIQEALKRPIKQKRKLRIFISNTFNPAKSDAEDGEGTVASWELRVEGRLLEDAALSKYDATKQKRKFSSFFKSLVIELDKDLYGPDNHLVEWHRTATTQETDGFQVKRPGDVNVRCTVLLMLDYQPPQFKLDPRLARLLGIHTQTRPVIIQALWQYIKTHKLQDPHEREFVLCDKYLQQIFESQRMKFSEIPQRLHALLMPPEPIIINHVISVDPNDQKKTACYDIDVEVDDTLKTQMNSFLLSTASQQEIATLDNKIHETIETINQLKTQREFMLSFARDPQGFINDWLQSQCRDLKTMTDVVGNPEEERRAEFYFQPWAQEAVCRYFYSKVQQRRQELEQALGIRNT

SEQ ID NO: 84 - DNA, 2770 bp, Homo sapiens
gttgggcggggcagggagttcgtagccgcctctgggtaactcgactcgggcggccaaacctccggaggccggggacggaaggcgggcccgcagcagatcctggatccggaatctcccgggcaggagcggaatctgtcccgaaccgggtctgtgaggaactcgcgaacttggattaggaaatcccggagcccggatcgacaaatcccggaacccggaattaagatcgccaagtcccggatcgcggagcacagagcacggagtggactcgacgcggagcccggagtccggatcgcggcaccgcgggacgggacggagcgatgtcgggccgaggcgcgggcgggttcccgctgcccccgctaagccctggcggcggcgccgtggctgcggccctgggagcgccgcctccccccgcgggacccggcatgctgcccggaccggcgctccggggaccgggtccggcaggaggcgtggggggccccggggccgccgccttccgccccatgggccccgcgggccccgcggcgcagtaccagcgacctggcatgtcaccagggaaccggatgcccatggctggcttgcaggtgggaccccctgctggctccccatttggtgcagcagctccgcttcgacctggcatgccacccaccatgatggatccattccgaaaacgcctgcttgtgccccaggcgcagcctcccatgcctgcccagcgccgggggttaaagaggaggaagatggcagataaggttctacctcagcgaatccgggagcttgttccagagtctcaggcgtacatggatctcttggcttttgagcggaagctggaccagaccattgctcgcaagcggatggagatccaggaggccatcaaaaagcctctgacacaaaagcgaaagcttcggatctacatttccaatacgttcagtcccagcaaggcggaaggcgatagtgcaggaactgcagggacccctgggggaaccccagcaggggacaaggtggcttcctgggaactccgagtggaaggaaaactgctggatgatcctagcaaacagaagaggaagttttcttcattctttaagagcctcgtcattgagctggacaaggagctgtacgggcctgacaatcacctggtggagtggcaccggatgcccaccacccaggagacagatggcttccaagtaaaacggcctggagacctcaacgtcaagtgcaccctcctgctcatgctggatcatcagcctccccagtacaaattggacccccgattggcaaggctgctgggagtgcacacgcagacgagggccgccatcatgcaggccctgtggctttacatcaagcacaaccagctgcaggatgggcacgagcgggagtacatcaactgcaaccgttacttccgccagatcttcagttgtggccgactccgtttctccgagattcccatgaagctggcagggttgctgcagcatccagaccccattgtcatcaaccatgtcattagtgtcgaccctaacgaccagaagaagacagcctgttacgacatcgatgtggaggtggacgacccactgaaggcccaaatgagcaattttctggcctctaccaccaatcagcaggagatcgcctcccttgatgtcaagatccatgagaccattgagtccatcaaccagctgaagacccagagagatttcatgctcagttttagcaccgacccccaggacttcatccaggaatggctccgttcccagcgccgagacctcaagatcatcactgatgtgattggaaatcctgaggaggagagacgagctgctttctaccaccagccctgggcccaggaagcagtaggcaggcacatctttgccaaggtgcagcagcgaaggcaggaactggaacaggtgctgggaattcgcctgacctaactgctcagggatctttcttcccagccctggagcctggagggagaccaccctctgggtccttgctggggccgcagacacgtaggctggggtgaggagtgtctgctgtcaccctctactctccagctttagtcttataaatgtagtgataggattccttgttgcttggtccccaaagccttatactttttgcattggctttaattgggttcagcagatgcctcctctgcccccctgcaggcaggcccaagtaggactgctggaggctgtgctttgacattgtaagacatttccgaaccaaaggctgctgggtttgcatgtttacagactccccctggggcgagggtcagagctggctctggggagctgggctaggaagaggaggtgcagcccagactcttcctagcctttctaaaccaaagttctttgccattcctacaagcccagccttgctgctggttttttcctttcctttgggtatttgcactattttgggagcaagttttctatgtgggagccactttttttgtacaggggtaagttgggggttttcagggagcctgttaggtgcctccttcttttctttcctcaatctatgcaagcggctctggccgccatcatctcctgggatgccagagggctgcctctccagcggcttgggccggggaggggacactccagttctctagcatggcctgaggtatggggtatgtgcatgtggaggccagggtaaggtgaatggggaggctgggaggactggtgttgccctttggagcttggtgaggagggtgggcctagggcttggcgagtgccacatctggcaggtttggaaatttccaaataaatccttttgtctattg

SEQ ID NO: 85 - protein, 531 aa, Homo sapiens
MSGRGAGGFPLPPLSPGGGAVAAALGAPPPPAGPGMLPGPALRGPGPAGGVGGPGAAAFRPMGPAGPAAQYQRPGMSPGNRMPMAGLQVGPPAGSPFGAAAPLRPGMPPTMMDPFRKRLLVPQAQPPMPAQRRGLKRRKMADKVLPQRIRELVPESQAYMDLLAFERKLDQTIARKRMEIQEAIKKPLTQKRKLRIYISNTFSPSKAEGDSAGTAGTPGGTPAGDKVASWELRVEGKLLDDPSKQKRKFSSFFKSLVIELDKELYGPDNHLVEWHRMPTTQETDGFQVKRPGDLNVKCTLLLMLDHQPPQYKLDPRLARLLGVHTQTRAAIMQALWLYIKHNQLQDGHEREYINCNRYFRQIFSCGRLRFSEIPMKLAGLLQHPDPIVINHVISVDPNDQKKTACYDIDVEVDDPLKAQMSNFLASTTNQQEIASLDVKIHETIESINQLKTQRDFMLSFSTDPQDFIQEWLRSQRRDLKIITDVIGNPEEERRAAFYHQPWAQEAVGRHIFAKVQQRRQELEQVLGIRLT

SEQ ID NO: 86 - DNA, 2341 bp, Homo sapiens
agtaccaggtgagcaaggaggacgcgagcggacgggggcgagaggcgctgcgagggcgcccgggccggcggctgaaggggcctcgacgacctggcatgtcaccagggaaccggatgcccatggctggcttgcaggtgggaccccctgctggctccccatttggtgcagcagctccgcttcgacctggcatgccacccaccatgatggatccattccgaaaacgcctgcttgtgccccaggcgcagcctcccatgcctgcccagcgccgggggttaaagaggaggaagatggcagataaggttctacctcagcgaatccgggagcttgttccagagtctcaggcgtacatggatctcttggcttttgagcggaagctggaccagaccattgctcgcaagcggatggagatccaggaggccatcaaaaagcctctgacacaaaagcgaaagcttcggatctacatttccaatacgttcagtcccagcaaggcggaaggcgatagtgcaggaactgcagggacccctgggggaaccccagcaggggacaaggtggcttcctgggaactccgagtggaaggaaaactgctggatgatcctagcaaacagaagaggaagttttcttcattctttaagagcctcgtcattgagctggacaaggagctgtacgggcctgacaatcacctggtggagtggcaccggatgcccaccacccaggagacagatggcttccaagtaaaacggcctggagacctcaacgtcaagtgcaccctcctgctcatgctggatcatcagcctccccagtacaaattggacccccgattggcaaggctgctgggagtgcacacgcagacgagggccgccatcatgcaggccctgtggctttacatcaagcacaaccagctgcaggatgggcacgagcgggagtacatcaactgcaaccgttacttccgccagatcttcagttgtggccgactccgtttctccgagattcccatgaagctggcagggttgctgcagcatccagaccccattgtcatcaaccatgtcattagtgtcgaccctaacgaccagaagaagacagcctgttacgacatcgatgtggaggtggacgacccactgaaggcccaaatgagcaattttctggcctctaccaccaatcagcaggagatcgcctcccttgatgtcaagatccatgagaccattgagtccatcaaccagctgaagacccagagagatttcatgctcagttttagcaccgacccccaggacttcatccaggaatggctccgttcccagcgccgagacctcaagatcatcactgatgtgattggaaatcctgaggaggagagacgagctgctttctaccaccagccctgggcccaggaagcagtaggcaggcacatctttgccaaggtgcagcagcgaaggcaggaactggaacaggtgctgggaattcgcctgacctaactgctcagggatctttcttcccagccctggagcctggagggagaccaccctctgggtccttgctggggccgcagacacgtaggctggggtgaggagtgtctgctgtcaccctctactctccagctttagtcttataaatgtagtgataggattccttgttgcttggtccccaaagccttatactttttgcattggctttaattgggttcagcagatgcctcctctgcccccctgcaggcaggcccaagtaggactgctggaggctgtgctttgacattgtaagacatttccgaaccaaaggctgctgggtttgcatgtttacagactccccctggggcgagggtcagagctggctctggggagctgggctaggaagaggaggtgcagcccagactcttcctagcctttctaaaccaaagttctttgccattcctacaagcccagccttgctgctggttttttcctttcctttgggtatttgcactattttgggagcaagttttctatgtgggagccactttttttgtacaggggtaagttgggggttttcagggagcctgttaggtgcctccttcttttctttcctcaatctatgcaagcggctctggccgccatcatctcctgggatgccagagggctgcctctccagcggcttgggccggggaggggacactccagttctctagcatggcctgaggtatggggtatgtgcatgtggaggccagggtaaggtgaatggggaggctgggaggactggtgttgccctttggagcttggtgaggagggtgggcctagggcttggcgagtgccacatctggcaggtttggaaatttccaaataaatccttttgtctattgaaaaaaaaaaaaaaaaaa

SEQ ID NO: 87 - protein, 456 aa, Homo sapiens
MSPGNRMPMAGLQVGPPAGSPFGAAAPLRPGMPPTMMDPFRKRLLVPQAQPPMPAQRRGLKRRKMADKVLPQRIRELVPESQAYMDLLAFERKLDQTIARKRMEIQEAIKKPLTQKRKLRIYISNTFSPSKAEGDSAGTAGTPGGTPAGDKVASWELRVEGKLLDDPSKQKRKFSSFFKSLVIELDKELYGPDNHLVEWHRMPTTQETDGFQVKRPGDLNVKCTLLLMLDHQPPQYKLDPRLARLLGVHTQTRAAIMQALWLYIKHNQLQDGHEREYINCNRYFRQIFSCGRLRFSEIPMKLAGLLQHPDPIVINHVISVDPNDQKKTACYDIDVEVDDPLKAQMSNFLASTTNQQEIASLDVKIHETIESINQLKTQRDFMLSFSTDPQDFIQEWLRSQRRDLKIITDVIGNPEEERRAAFYHQPWAQEAVGRHIFAKVQQRRQELEQVLGIRLT

SEQ ID NO: 88 - DNA, 2374 bp, Homo sapiens
agtgtgtgcaaggcagagctgccaaacaggccttgcaggcagcagccatggggaggcgggtgggggtggaggtgactcccagatgggctccacagaaatgtcagggagcaaggcctcagcgacctggcatgtcaccagggaaccggatgcccatggctggcttgcaggtgggaccccctgctggctccccatttggtgcagcagctccgcttcgacctggcatgccacccaccatgatggatccattccgaaaacgcctgcttgtgccccaggcgcagcctcccatgcctgcccagcgccgggggttaaagaggaggaagatggcagataaggttctacctcagcgaatccgggagcttgttccagagtctcaggcgtacatggatctcttggcttttgagcggaagctggaccagaccattgctcgcaagcggatggagatccaggaggccatcaaaaagcctctgacacaaaagcgaaagcttcggatctacatttccaatacgttcagtcccagcaaggcggaaggcgatagtgcaggaactgcagggacccctgggggaaccccagcaggggacaaggtggcttcctgggaactccgagtggaaggaaaactgctggatgatcctagcaaacagaagaggaagttttcttcattctttaagagcctcgtcattgagctggacaaggagctgtacgggcctgacaatcacctggtggagtggcaccggatgcccaccacccaggagacagatggcttccaagtaaaacggcctggagacctcaacgtcaagtgcaccctcctgctcatgctggatcatcagcctccccagtacaaattggacccccgattggcaaggctgctgggagtgcacacgcagacgagggccgccatcatgcaggccctgtggctttacatcaagcacaaccagctgcaggatgggcacgagcgggagtacatcaactgcaaccgttacttccgccagatcttcagttgtggccgactccgtttctccgagattcccatgaagctggcagggttgctgcagcatccagaccccattgtcatcaaccatgtcattagtgtcgaccctaacgaccagaagaagacagcctgttacgacatcgatgtggaggtggacgacccactgaaggcccaaatgagcaattttctggcctctaccaccaatcagcaggagatcgcctcccttgatgtcaagatccatgagaccattgagtccatcaaccagctgaagacccagagagatttcatgctcagttttagcaccgacccccaggacttcatccaggaatggctccgttcccagcgccgagacctcaagatcatcactgatgtgattggaaatcctgaggaggagagacgagctgctttctaccaccagccctgggcccaggaagcagtaggcaggcacatctttgccaaggtgcagcagcgaaggcaggaactggaacaggtgctgggaattcgcctgacctaactgctcagggatctttcttcccagccctggagcctggagggagaccaccctctgggtccttgctggggccgcagacacgtaggctggggtgaggagtgtctgctgtcaccctctactctccagctttagtcttataaatgtagtgataggattccttgttgcttggtccccaaagccttatactttttgcattggctttaattgggttcagcagatgcctcctctgcccccctgcaggcaggcccaagtaggactgctggaggctgtgctttgacattgtaagacatttccgaaccaaaggctgctgggtttgcatgtttacagactccccctggggcgagggtcagagctggctctggggagctgggctaggaagaggaggtgcagcccagactcttcctagcctttctaaaccaaagttctttgccattcctacaagcccagccttgctgctggttttttcctttcctttgggtatttgcactattttgggagcaagttttctatgtgggagccactttttttgtacaggggtaagttgggggttttcagggagcctgttaggtgcctccttcttttctttcctcaatctatgcaagcggctctggccgccatcatctcctgggatgccagagggctgcctctccagcggcttgggccggggaggggacactccagttctctagcatggcctgaggtatggggtatgtgcatgtggaggccagggtaaggtgaatggggaggctgggaggactggtgttgccctttggagcttggtgaggagggtgggcctagggcttggcgagtgccacatctggcaggtttggaaatttccaaataaatccttttgtctattgaaaaaaaaaaaaaaaaaa

SEQ ID NO: 89 - protein, 483 aa, Homo sapiens
MGRRVGVEVTPRWAPQKCQGARPQRPGMSPGNRMPMAGLQVGPPAGSPFGAAAPLRPGMPPTMMDPFRKRLLVPQAQPPMPAQRRGLKRRKMADKVLPQRIRELVPESQAYMDLLAFERKLDQTIARKRMEIQEAIKKPLTQKRKLRIYISNTFSPSKAEGDSAGTAGTPGGTPAGDKVASWELRVEGKLLDDPSKQKRKFSSFFKSLVIELDKELYGPDNHLVEWHRMPTTQETDGFQVKRPGDLNVKCTLLLMLDHQPPQYKLDPRLARLLGVHTQTRAAIMQALWLYIKHNQLQDGHEREYINCNRYFRQIFSCGRLRFSEIPMKLAGLLQHPDPIVINHVISVDPNDQKKTACYDIDVEVDDPLKAQMSNFLASTTNQQEIASLDVKIHETIESINQLKTQRDFMLSFSTDPQDFIQEWLRSQRRDLKIITDVIGNPEEERRAAFYHQPWAQEAVGRHIFAKVQQRRQELEQVLGIRLT

SEQ ID NO: 90 - DNA, 2767 bp, Mus musculus
ctccggcgatcaaacctccggaggccgggagaggcctgcgggctcgcggcacatcccggatctggagtatccctggcaggagcggagtcagaggggccgcgggatcctaaagccgggctgcaaagaacttgcgaacttggagtagaagatcccggaacccggtagtaaaatcgggaagtcccggatcgcggaacgtagctcgcggagcggactcaacacggagaccggaggccggatcgctgcaccgcgggacgggacagagtgatgtccggccgtggcgcgggcgggttcccgctgcctccgctgagccccggcggcggcgccgttgccgcggcccttggtgcgccgcctccgcctgcgggacccggaatgctgcccagcccggcgctcaggggcccggggccttctggaggcatgggggtaccgggggccgccgccttccgccccatgggccccgctggccccgcggcgcagtaccagcgtcctggcatgtcaccaggaagcaggatgcccatggctggcttgcaggtgggacctcctgccggttccccatttggcacagctgctccgctccgacctggcatgccacctaccatgatggatccattccgaaaacgcctgcttgtgcctcaggcccagcccccgatgcctgcccagcgccgagggttaaagaggaggaagatggcagataaggttctacctcagcgaatccgggagcttgtcccagagtctcaggcatacatggatcttttagctttcgagaggaagctggaccagaccatcgctcgcaagcggatggagattcaagaggccatcaagaagcctctgacgcaaaagcgaaaacttcggatctatatttccaatacattcagccccagcaaggcggatggagataatgcgggaactgcggggacccctgggggaaccccggcagcagacaaggtggcctcctgggagcttcgagtagaggggaaactgctggatgatcctagcaaacagaagaggaagttctcatcattctttaagagccttgtgattgagttggacaaggaactctatgggccggacaaccatctggtggagtggcatcggatgcccaccacacaggaaacagatggctttcaggtgaaacggccaggagatctcaatgtcaagtgcacccttctgctcatgctggatcatcagcctcctcagtataaactggacccccgcctggcgaggttgctgggagtgcacacacagaccagggcggcaatcatgcaggcactgtggctttacatcaaacacaaccagctgcaggacggccatgagcgcgagtacatcaactgcaatcgttacttccgccagatcttcagttgtggccgactccgtttctccgagattcccatgaagctggctggattgctgcagcatccagaccccattgttattaatcatgtcattagtgtggatcctaatgaccaaaagaagacagcctgctatgacattgatgtagaggttgatgacccactgaaggcccagatgagcaacttcctggcctctaccaccaaccagcaggagattgcttctcttgacgtcaagatccatgagaccattgagtccatcaaccagctaaagacccagagggatttcatgctcagctttagcaccgagccccaggacttcatccaggagtggctccgttcccaacgccgagacctcaagatcatcacagatgtgattggaaaccctgaggaggagagacgagctgctttctaccaccagccctgggctcaggaagcagtggggaggcacatctttgccaaggtgcagcagcgaaggcaggaactggaacaggtgctgggaattcgcctgacctaactgctcagggattgcctccttccttcctcccctgccctggatggaacctggcaagagcccgtcctctgggttctggcttgggctgcagacatgtaggatggagtgaggtgtgtttcctgtcaccctccactccccagctttagtttcataaatgtagttttagatccctcactgcttggttcccaaagccttattactgaccttttagcgctggctttaattgggtttgcaatgagcggcctcagccccctgcaggcaggcaggcctgagtaggaggctggaggctgtgctttaactttgtaccagacatttccaaaccaaaggctgctgggtttgcatgtttacaggctccaccctagggccagtgccagagctggctttggggagctgggcaaggaagagaaggccctagactcttcctggcctttctaaccaaagttttttgccattcctacaagcccagtcttgctgctggtttgtccttctttttgggtatttgcactatttggggagcaggtttttctatgtgggagccacttttttgtacagaggtaatggggtttttcagggagcccacttggtgcctccttcttcctttcttttcttaatctatgcaagcggctgcagccgccatcatctcctggtatgccacaaggctgcccacccatagctgcttgggcagggggaggtggaatctcctgagagtggcaatgccagttctctaacccagttacagcaggggtgtgtgtgcgtgcgtgcgtgcgtgctgcaggggaaggggaaagctggaggactgctgttaccttttgcagtcggtcttaaagaggatgggcctaaggcttggcaaacttggaaaattccaaataaatctttttgtttattggtggtgcccagaaaaaaaaaaaaa

SEQ ID NO: 91 - protein, 531 aa, Mus musculus
MSGRGAGGFPLPPLSPGGGAVAAALGAPPPPAGPGMLPSPALRGPGPSGGMGVPGAAAFRPMGPAGPAAQYQRPGMSPGSRMPMAGLQVGPPAGSPFGTAAPLRPGMPPTMMDPFRKRLLVPQAQPPMPAQRRGLKRRKMADKVLPQRIRELVPESQAYMDLLAFERKLDQTIARKRMEIQEAIKKPLTQKRKLRIYISNTFSPSKADGDNAGTAGTPGGTPAADKVASWELRVEGKLLDDPSKQKRKFSSFFKSLVIELDKELYGPDNHLVEWHRMPTTQETDGFQVKRPGDLNVKCTLLLMLDHQPPQYKLDPRLARLLGVHTQTRAAIMQALWLYIKHNQLQDGHEREYINCNRYFRQIFSCGRLRFSEIPMKLAGLLQHPDPIVINHVISVDPNDQKKTACYDIDVEVDDPLKAQMSNFLASTTNQQEIASLDVKIHETIESINQLKTQRDFMLSFSTEPQDFIQEWLRSQRRDLKIITDVIGNPEEERRAAFYHQPWAQEAVGRHIFAKVQQRRQELEQVLGIRLT

SEQ ID NO: 92 - DNA, 2401 bp, Mus musculus
tttgttcctggtctccccatttgagagagagagagagagatggagggtatgggctatggacctcggagggctccgccactgacctgtgtccctccactgttccactttcctcagcgtcctggcatgtcaccaggaagcaggatgcccatggctggcttgcaggtgggacctcctgccggttccccatttggcacagctgctccgctccgacctggcatgccacctaccatgatggatccattccgaaaacgcctgcttgtgcctcaggcccagcccccgatgcctgcccagcgccgagggttaaagaggaggaagatggcagataaggttctacctcagcgaatccgggagcttgtcccagagtctcaggcatacatggatcttttagctttcgagaggaagctggaccagaccatcgctcgcaagcggatggagattcaagaggccatcaagaagcctctgacgcaaaagcgaaaacttcggatctatatttccaatacattcagccccagcaaggcggatggagataatgcgggaactgcggggacccctgggggaaccccggcagcagacaaggtggcctcctgggagcttcgagtagaggggaaactgctggatgatcctagcaaacagaagaggaagttctcatcattctttaagagccttgtgattgagttggacaaggaactctatgggccggacaaccatctggtggagtggcatcggatgcccaccacacaggaaacagatggctttcaggtgaaacggccaggagatctcaatgtcaagtgcacccttctgctcatgctggatcatcagcctcctcagtataaactggacccccgcctggcgaggttgctgggagtgcacacacagaccagggcggcaatcatgcaggcactgtggctttacatcaaacacaaccagctgcaggacggccatgagcgcgagtacatcaactgcaatcgttacttccgccagatcttcagttgtggccgactccgtttctccgagattcccatgaagctggctggattgctgcagcatccagaccccattgttattaatcatgtcattagtgtggatcctaatgaccaaaagaagacagcctgctatgacattgatgtagaggttgatgacccactgaaggcccagatgagcaacttcctggcctctaccaccaaccagcaggagattgcttctcttgacgtcaagatccatgagaccattgagtccatcaaccagctaaagacccagagggatttcatgctcagctttagcaccgagccccaggacttcatccaggagtggctccgttcccaacgccgagacctcaagatcatcacagatgtgattggaaaccctgaggaggagagacgagctgctttctaccaccagccctgggctcaggaagcagtggggaggcacatctttgccaaggtgcagcagcgaaggcaggaactggaacaggtgctgggaattcgcctgacctaactgctcagggattgcctccttccttcctcccctgccctggatggaacctggcaagagcccgtcctctgggttctggcttgggctgcagacatgtaggatggagtgaggtgtgtttcctgtcaccctccactccccagctttagtttcataaatgtagttttagatccctcactgcttggttcccaaagccttattactgaccttttagcgctggctttaattgggtttgcaatgagcggcctcagccccctgcaggcaggcaggcctgagtaggaggctggaggctgtgctttaactttgtaccagacatttccaaaccaaaggctgctgggtttgcatgtttacaggctccaccctagggccagtgccagagctggctttggggagctgggcaaggaagagaaggccctagactcttcctggcctttctaaccaaagttttttgccattcctacaagcccagtcttgctgctggtttgtccttctttttgggtatttgcactatttggggagcaggtttttctatgtgggagccacttttttgtacagaggtaatggggtttttcagggagcccacttggtgcctccttcttcctttcttttcttaatctatgcaagcggctgcagccgccatcatctcctggtatgccacaaggctgcccacccatagctgcttgggcagggggaggtggaatctcctgagagtggcaatgccagttctctaacccagttacagcaggggtgtgtgtgcgtgcgtgcgtgcgtgctgcaggggaaggggaaagctggaggactgctgttaccttttgcagtcggtcttaaagaggatgggcctaaggcttggcaaacttggaaaattccaaataaatctttttgtttattggtggtgcccagaaaaaaaaaaaaa

SEQ ID NO: 93 - protein, 484 aa, Mus musculus
MEGMGYGPRRAPPLTCVPPLFHFPQRPGMSPGSRMPMAGLQVGPPAGSPFGTAAPLRPGMPPTMMDPFRKRLLVPQAQPPMPAQRRGLKRRKMADKVLPQRIRELVPESQAYMDLLAFERKLDQTIARKRMEIQEAIKKPLTQKRKLRIYISNTFSPSKADGDNAGTAGTPGGTPAADKVASWELRVEGKLLDDPSKQKRKFSSFFKSLVIELDKELYGPDNHLVEWHRMPTTQETDGFQVKRPGDLNVKCTLLLMLDHQPPQYKLDPRLARLLGVHTQTRAAIMQALWLYIKHNQLQDGHEREYINCNRYFRQIFSCGRLRFSEIPMKLAGLLQHPDPIVINHVISVDPNDQKKTACYDIDVEVDDPLKAQMSNFLASTTNQQEIASLDVKIHETIESINQLKTQRDFMLSFSTEPQDFIQEWLRSQRRDLKIITDVIGNPEEERRAAFYHQPWAQEAVGRHIFAKVQQRRQELEQVLGIRLT

SEQ ID NO: 94 - DNA, 1689 bp, Homo sapiens
ctggcatcttcctcccctcctcctttccagatcctcagaatggcccttggtgctgcaggcgcggtgggctccgggcccaggcaccgagggggcactggatgactctccaggtgcaggaccctgccatctatgactccaggtcttcagcacccacccaccgtggtacagcgccccgggatgccgtctggagcccggatgccccaccagggggcgcccatgggccccccgggctccccgtacatgggcagccccgccgtgcgacccggcctggcccccgcgggcatggagcccgcccgcaagcgagcagcgcccccgcccgggcagagccaggcacagagccagggccagccggtgcccaccgcccccgcgcggagccgcagtgccaagaggaggaagatggctgacaaaatcctccctcaaaggattcgggagctggtccccgagtcccaggcttacatggacctcttggcatttgagaggaaactggatcaaaccatcatgcggaagcgggtggacatccaggaggctctgaagaggcccatgaagcaaaagcggaagctgcgactctatatctccaacacttttaaccctgcgaagcctgatgctgaggattccgacggcagcattgcctcctgggagctacgggtggaggggaagctcctggatgatcccagcaaacagaagcggaagttctcttctttcttcaagagtttggtcatcgagctggacaaagatctttatggccctgacaaccacctcgttgagtggcatcggacacccacgacccaggagacggacggcttccaggtgaaacggcctggggacctgagtgtgcgctgcacgctgctcctcatgctggactaccagcctccccagttcaaactggatccccgcctagcccggctgctggggctgcacacacagagccgctcagccattgtccaggccctgtggcagtatgtgaagaccaacaggctgcaggactcccatgacaaggaatacatcaatggggacaagtatttccagcagatttttgattgtccccggctgaagttttctgagattccccagcgcctcacagccctgctattgccccctgacccaattgtcatcaaccatgtcatcagcgtggacccttcagaccagaagaagacggcgtgctatgacattgacgtggaggtggaggagccattaaaggggcagatgagcagcttcctcctatccacggccaaccagcaggagatcagtgctctggacagtaagatccatgagacgattgagtccataaaccagctcaagatccagagggacttcatgctaagcttctccagagaccccaaaggctatgtccaagacctgctccgctcccagagccgggacctcaaggtgatgacagatgtagccggcaaccctgaagaggagcgccgggctgagttctaccaccagccctggtcccaggaggccgtcagtcgctacttctactgcaagatccagcagcgcaggcaggagctggagcagtcgctggttgtgcgcaacacctaggagcccaaaaataagcagcacgacggaactttcagccgtgtcccgggccccagcattttgccccgggctccagcatcactcctctgccaccttggggtgtggggctggattaaaagtcattcatctgacaaaaaaaaaaaaaaaaaa

SEQ ID NO: 95 - protein, 470 aa, Homo sapiens
MTPGLQHPPTVVQRPGMPSGARMPHQGAPMGPPGSPYMGSPAVRPGLAPAGMEPARKRAAPPPGQSQAQSQGQPVPTAPARSRSAKRRKMADKILPQRIRELVPESQAYMDLLAFERKLDQTIMRKRVDIQEALKRPMKQKRKLRLYISNTFNPAKPDAEDSDGSIASWELRVEGKLLDDPSKQKRKFSSFFKSLVIELDKDLYGPDNHLVEWHRTPTTQETDGFQVKRPGDLSVRCTLLLMLDYQPPQFKLDPRLARLLGLHTQSRSAIVQALWQYVKTNRLQDSHDKEYINGDKYFQQIFDCPRLKFSEIPQRLTALLLPPDPIVINHVISVDPSDQKKTACYDIDVEVEEPLKGQMSSFLLSTANQQEISALDSKIHETIESINQLKIQRDFMLSFSRDPKGYVQDLLRSQSRDLKVMTDVAGNPEEERRAEFYHQPWSQEAVSRYFYCKIQQRRQELEQSLVVRNT

SEQ ID NO: 96 - DNA, 1728 bp, Homo sapiens
gccgggccgagccgagcgccgagcagggagcgggcggccgcgctccgggccggggtcccgggggagcagatcctcagaatggcccttggtgctgcaggcgcggtgggctccgggcccaggcaccgagggggcactggatgactctccaggtgcaggaccctgccatctatgactccaggtcttcagcacccacccaccgtggtacagcgccccgggatgccgtctggagcccggatgccccaccagggggcgcccatgggccccccgggctccccgtacatgggcagccccgccgtgcgacccggcctggcccccgcgggcatggagcccgcccgcaagcgagcagcgcccccgcccgggcagagccaggcacagagccagggccagccggtgcccaccgcccccgcgcggagccgcagtgccaagaggaggaagatggctgacaaaatcctccctcaaaggattcgggagctggtccccgagtcccaggcttacatggacctcttggcatttgagaggaaactggatcaaaccatcatgcggaagcgggtggacatccaggaggctctgaagaggcccatgaagcaaaagcggaagctgcgactctatatctccaacacttttaaccctgcgaagcctgatgctgaggattccgacggcagcattgcctcctgggagctacgggtggaggggaagctcctggatgatcccagcaaacagaagcggaagttctcttctttcttcaagagtttggtcatcgagctggacaaagatctttatggccctgacaaccacctcgttgagtggcatcggacacccacgacccaggagacggacggcttccaggtgaaacggcctggggacctgagtgtgcgctgcacgctgctcctcatgctggactaccagcctccccagttcaaactggatccccgcctagcccggctgctggggctgcacacacagagccgctcagccattgtccaggccctgtggcagtatgtgaagaccaacaggctgcaggactcccatgacaaggaatacatcaatggggacaagtatttccagcagatttttgattgtccccggctgaagttttctgagattccccagcgcctcacagccctgctattgccccctgacccaattgtcatcaaccatgtcatcagcgtggacccttcagaccagaagaagacggcgtgctatgacattgacgtggaggtggaggagccattaaaggggcagatgagcagcttcctcctatccacggccaaccagcaggagatcagtgctctggacagtaagatccatgagacgattgagtccataaaccagctcaagatccagagggacttcatgctaagcttctccagagaccccaaaggctatgtccaagacctgctccgctcccagagccgggacctcaaggtgatgacagatgtagccggcaaccctgaagaggagcgccgggctgagttctaccaccagccctggtcccaggaggccgtcagtcgctacttctactgcaagatccagcagcgcaggcaggagctggagcagtcgctggttgtgcgcaacacctaggagcccaaaaataagcagcacgacggaactttcagccgtgtcccgggccccagcattttgccccgggctccagcatcactcctctgccaccttggggtgtggggctggattaaaagtcattcatctgacaaaaaaaaaaaaaaaaaa

SEQ ID NO: 97 - protein, 456 aa, Homo sapiens; identical to SEQ ID NO: 87

SEQ ID NO: 98 - DNA, 1700 bp, Homo sapiens
agcaggactcagaggggagagttggaggaaaaaaaaaggcagaaaagggaaagaaagaggaagagagagagagagtgagaggagccgctgagcccaccccgatggccgcggacgaagttgccggaggggcgcgcaaagccacgaaaagcaaactttttgagtttctggtccatggggtgcgccccgggatgccgtctggagcccggatgccccaccagggggcgcccatgggccccccgggctccccgtacatgggcagccccgccgtgcgacccggcctggcccccgcgggcatggagcccgcccgcaagcgagcagcgcccccgcccgggcagagccaggcacagagccagggccagccggtgcccaccgcccccgcgcggagccgcagtgccaagaggaggaagatggctgacaaaatcctccctcaaaggattcgggagctggtccccgagtcccaggcttacatggacctcttggcatttgagaggaaactggatcaaaccatcatgcggaagcgggtggacatccaggaggctctgaagaggcccatgaagcaaaagcggaagctgcgactctatatctccaacacttttaaccctgcgaagcctgatgctgaggattccgacggcagcattgcctcctgggagctacgggtggaggggaagctcctggatgatcccagcaaacagaagcggaagttctcttctttcttcaagagtttggtcatcgagctggacaaagatctttatggccctgacaaccacctcgttgagtggcatcggacacccacgacccaggagacggacggcttccaggtgaaacggcctggggacctgagtgtgcgctgcacgctgctcctcatgctggactaccagcctccccagttcaaactggatccccgcctagcccggctgctggggctgcacacacagagccgctcagccattgtccaggccctgtggcagtatgtgaagaccaacaggctgcaggactcccatgacaaggaatacatcaatggggacaagtatttccagcagatttttgattgtccccggctgaagttttctgagattccccagcgcctcacagccctgctattgccccctgacccaattgtcatcaaccatgtcatcagcgtggacccttcagaccagaagaagacggcgtgctatgacattgacgtggaggtggaggagccattaaaggggcagatgagcagcttcctcctatccacggccaaccagcaggagatcagtgctctggacagtaagatccatgagacgattgagtccataaaccagctcaagatccagagggacttcatgctaagcttctccagagaccccaaaggctatgtccaagacctgctccgctcccagagccgggacctcaaggtgatgacagatgtagccggcaaccctgaagaggagcgccgggctgagttctaccaccagccctggtcccaggaggccgtcagtcgctacttctactgcaagatccagcagcgcaggcaggagctggagcagtcgctggttgtgcgcaacacctaggagcccaaaaataagcagcacgacggaactttcagccgtgtcccgggccccagcattttgccccgggctccagcatcactcctctgccaccttggggtgtggggctggattaaaagtcattcatctgacaaaaaaaaaaaaaaaaaa

SEQ ID NO: 99 - DNA, 1743 bp, Mus musculus
gggccccctccccactccgctcgagtagaagtgtgagagagcccagcaggactcagaggggagagttggaggaaaaaaaaggcagaaaagggaaagaaagaggaagagagagagagagtgagaggagccgctgagcccaccccgatggccgcggacgaagttgccggaggggcgcgcaaagccacgaaaagcaaactttttgagtttctggtccatggggtgcgccccgggatgccgtctggagcccgaatgccccaccagggggcgcccatgggccccccgggctccccgtacatgggcagccccgcggtacgacccggcctggcccccgcgggcatggagcccgcccgcaagcgagcagcgcccccgcccgggcagagccaggcacagggccagggccagcccgtgcccaccgccccagcgcggagccgcagtgccaagaggaggaagatggctgacaaaatcctccctcaaaggattcgggagctggtacccgagtcccaggcttacatggacctcctagcatttgagaggaaactggatcaaaccatcatgcggaagcgggtggacatccaggaggccctgaagaggcccatgaagcaaaagcgaaagctgcgcctttatatctccaatacttttaaccctgcgaagcctgatgcggaagactctgatggcagcattgcctcctgggagctgcgggtggaggggaagctcttggatgatcctagtaagcagaagaggaagttttcttccttcttcaagagtttggtcattgagttggacaaagacctttatggcccagacaaccaccttgttgagtggcaccggacacccacaacccaggaaacagatgggttccaagtgaagagaccaggggacttgagtgtgcgctgcaccctgctcctgatgctggactatcagcctccccagttcaaattggacccccgcttagcccggctgctggggttacacacacagagccgctcagccattgtccaggcactgtggcagtatgtgaagaccaacaggctacaggactcccatgacaaggagtacatcaatggcgacaagtatttccagcagatttttgactgcccccgcctaaagttctctgagattccccagcgcctcacagccctgctgctgccccctgaccccattgtgatcaaccacgtcatcagcgtggacccatcagaccagaagaagacagcgtgctatgacatagatgtggaggtggaggaaccgctgaaagggcagatgagtagcttcctcctgtccacggccaaccagcaggagatcagtgctctggacagtaagatccatgagacgattgagtccataaaccagctcaagatccagagggacttcatgctaagtttctccagagaccccaaaggctacgtccaagacctgctccgctcccagagccgtgatctcaaggtgatgacagatgtggcagggaaccccgaggaagaacgcagggctgagttctaccaccagccctggtcccaggaagccgttagccgctacttctactgtaagatccagcagcgcaggcaggagctggagcagtcgctggtcgtgcgcaacacctaggagcccgtgaacaagcgtcagggtggaccagccactccgcccagcacaggccctgggctctggactccccctctcgcgctgtgcggaaggtggggagggctggatggattaaaggtcacgtaacagacaaaaaaaaaaaaaaaaaaa

SEQ ID NO: 100 - protein, 483 aa, Mus musculus
MAADEVAGGARKATKSKLFEFLVHGVRPGMPSGARMPHQGAPMGPPGSPYMGSPAVRPGLAPAGMEPARKRAAPPPGQSQAQGQGQPVPTAPARSRSAKRRKMADKILPQRIRELVPESQAYMDLLAFERKLDQTIMRKRVDIQEALKRPMKQKRKLRLYISNTFNPAKPDAEDSDGSIASWELRVEGKLLDDPSKQKRKFSSFFKSLVIELDKDLYGPDNHLVEWHRTPTTQETDGFQVKRPGDLSVRCTLLLMLDYQPPQFKLDPRLARLLGLHTQSRSAIVQALWQYVKTNRLQDSHDKEYINGDKYFQQIFDCPRLKFSEIPQRLTALLLPPDPIVINHVISVDPSDQKKTACYDIDVEVEEPLKGQMSSFLLSTANQQEISALDSKIHETIESINQLKIQRDFMLSFSRDPKGYVQDLLRSQSRDLKVMTDVAGNPEEERRAEFYHQPWSQEAVSRYFYCKIQQRRQELEQSLVVRNT

SEQ ID NO: 101 - DNA, 2425 bp, Homo sapiens
gctccggacgcgaggggcggggcgagcgcgggacaaagggaagcgaagccggagctgcgggcgctttttctgcccgcggtgtctcagattcattcttaaggaactgagaacttaatcttccaaaatgtcaaaaagaccatcttatgccccacctcccaccccagctcctgcaacacaaatgcccagcacaccagggtttgtgggatacaatccatacagtcatctcgcctacaacaactacaggctgggagggaacccgggcaccaacagccgggtcacggcatcctctggtatcacgattccaaaacccccaaagccaccagataagccgctgatgccctacatgaggtacagcagaaaggtctgggaccaagtaaaggcttccaaccctgacctaaagttgtgggagattggcaagattattggtggcatgtggcgagatctcactgatgaagaaaaacaagaatatttaaacgaatacgaagcagaaaagatagagtacaatgaatctatgaaggcctatcataattcccccgcgtaccttgcttacataaatgcaaaaagtcgtgcagaagctgctttagaggaagaaagtcgacagagacaatctcgcatggagaaaggagaaccgtacatgagcattcagcctgctgaagatccagatgattatgatgatggcttttcaatgaagcatacagccaccgcccgtttccagagaaaccaccgcctcatcagtgaaattcttagtgagagtgtggtgccagacgttcggtcagttgtcacaacagctagaatgcaggtcctcaaacggcaggtccagtccttaatggttcatcagcgaaaactagaagctgaacttcttcaaatagaggaacgacaccaggagaagaagaggaaattcctggaaagcacagattcatttaacaatgaacttaaaaggttgtgcggtctgaaagtagaagtggatatggagaaaattgcagctgagattgcacaggcagaggaacaggcccgcaaaaggcaggaggaaagggagaaggaggccgcagagcaagctgagcgcagtcagagcagcatcgttcctgaggaagaacaagcagctaacaaaggcgaggagaagaaagacgacgagaacattccgatggagacagaggagacacaccttgaagaaacaacagagagccaacagaatggtgaagaaggcacgtctactcctgaggacaaggagagtgggcaggagggggtcgacagtatggcagaggaaggaaccagtgatagtaacactggctcggagagcaacagtgcaacagtggaggagccaccaacagatcccataccagaagatgagaaaaaagaataagtgttgccttgttttgtgtgttctaaatactttttttaatgaaaaaatgttttttggttttaatggtgttacgtggtttgtgtattaattttttttcttgtccatatcacaccaccaaaggcttttggaccatttagcatcatgagcctaatggctcagtcagtcacctttcttaagtgttgtgaagatggctcttttctttggatcttgtttctagccctcaactgctgaaagcctcagaatttagattaattgagaaaacacccacctcttttagagaattatcctttgatgctgcagaatctactcttacaatgccttcctacagctcactggggtgcttaccaaagccatagctttaaaccttcccagtccccatcagtagcttcctgaaagtctcctctcttgtttacttctgcaaagggtagcttcttaaaaacgtgatcatgtatgagtatgtatttgttcacttacccttttttacttttaatcaatgtcagataccaagagttgtgttaagctgagtgtagtgtgtaactaactacacttggatcttactgatccagaaatagtccccatagttagagtagttacttatgaagtggttattaaagtgaacacagcacatatacattatctatactgctttttgttatgattaatactgggtatgttctggtaaatccatccttattgtatagaaaaaaaattacttttttaccaggttttccaaagacagaatagatcacaaagctcaaggaatttaatattcttgtaatggactagataattcaaactgattagcccattccagaagaaaaacagctgggaattaagttaatccacttgaaattgttttacaataatcagaacatccaaacctcaaggctcaggatcccatagaccagagcccacctttttgataaacttagtaaagtcttggagactagaagcaagatagtttgtgacacataagcttcccaaaaactagaatagatttttactgaatagtggtatatctgatggtatatgtttcttaaaggtccaaatgtaataaaaaaaaaa

SEQ ID NO: 102 - protein, 411 aa, Homo sapiens
MSKRPSYAPPPTPAPATQMPSTPGFVGYNPYSHLAYNNYRLGGNPGTNSRVTASSGITIPKPPKPPDKPLMPYMRYSRKVWDQVKASNPDLKLWEIGKIIGGMWRDLTDEEKQEYLNEYEAEKIEYNESMKAYHNSPAYLAYINAKSRAEAALEEESRQRQSRMEKGEPYMSIQPAEDPDDYDDGFSMKHTATARFQRNHRLISEILSESVVPDVRSVVTTARMQVLKRQVQSLMVHQRKLEAELLQIEERHQEKKRKFLESTDSFNNELKRLCGLKVEVDMEKIAAEIAQAEEQARKRQEEREKEAAEQAERSQSSIVPEEEQAANKGEEKKDDENIPMETEETHLEETTESQQNGEEGTSTPEDKESGQEGVDSMAEEGTSDSNTGSESNSATVEEPPTDPIPEDEKKE

SEQ ID NO: 103 - DNA, 2961 bp, Mus musculus
ggcggaggcaggggagccccgctgggcgccagcaaggacctaaacgcagcgacccgggtcctccccgcctacattctccatcttctccattcatacgtccatcagcggaggactgaagaccagagcgaagggaaaagccagagtgcatggtgtgtgggaactgcgtcccaccctctcccgggagaggctccggcgagcctttcccctccggcgcccgcctcacgcggcggcgcccaccgcctcagtgaagccccgggcgcgcagtctgcgcagttcctgccgccgggccgcgaaccagggcccgcaacgcggcccagccttctccgccctcctcgccgtgacgaatcggcgcccgactgggacgggatccaaattggaagacttctgaggaaacccaggagcctgacgaaattttttttaaaaatccttggcgccctaagcctcgccgcgtgctcactggaagggctgttcgtctgccgggagccggccgcggccggcagacaattcccgggagcgtgtggaaagtgcgagcgcggaagctccggcgcgaggggcggggcgagcgcgggacaaagggaagcgaagccggagctgcgggcgcctgctcggcccgcggtgtctcagattcattcttaaggaactgagaacttaatcttccaaaatgtcaaaaagaccatcttatgccccacctcccaccccagctcctgcaacacaaatgcccagcacaccagggtttgtgggatacaatccatacagtcatctcgcctacaacaactacaggctgggagggaacccgggcaccaacagccgggtcacggcgtcctctggcattacgattccaaagcctccaaagccaccagataagccgctgatgccctacatgaggtacagcagaaaggtctgggaccaagtaaaggcttccaaccctgacctaaagttgtgggagattggcaagattattggtggcatgtggcgagatctcactgatgaagagaagcaagaatatttaaacgaatacgaagcagaaaagatagagtacaatgagtctatgaaggcctaccataattcccctgcgtaccttgcctatattaatgcaaaaagtcgtgcggaagctgcattagaggaagaaagtcgacagagacagtctcgcatggagaaaggagaaccttacatgagcattcagcctgctgaggatccagacgactatgatgatggcttttcaatgaagcacacagccactgcccgtttccagagaaaccaccgtctcatcagtgagatcctcagtgagagtgtggtacctgatgtgcggtcggttgtcacaacagctagaatgcaggtcctcaagcgacaggtccagtctttaatggttcatcagcggaaactagaagccgagctccttcagatagaggaacgacaccaggaaaagaagaggaaattcctggaaagcacggactcctttaacaatgaacttaaaaggttatgtggtctgaaggtggaagtagacatggagaagattgcggctgagatcgcacaggcggaggaacaagcccgcaagaggcaagaggagagggagaaggaggcagcagagcaggctgagcgcagtcagagcagcatggcccctgaggaagagcaagtggcgaacaaagccgaggagaagaaagatgaggagagcatcccgatggagacagaggagacacaccttgaagacacagcagagagccagcagaatggtgaagaaggcacgtctactcctgaggacaaggagagtgggcaggagggggttgacagcatggaggtggaagggaccagtgacagtaacacgggctcagagagcaacagcgccacagtggaggagccgcccacagacccagtgccagaagacgagaagaaggagtaaatgttgccttgttttatgtgacctaaaacttttttaaatgaaaaaaaaatgtggttttttttttggttttaatggtgttatgtggtctgtgtattaattatttacttttccgttgatacaacatgaaggtctttgaaccctcagcatcatagcctaatgccagccgctcacctttcttagctctcaacgtctgaaacctcagagctgagattaatcaagacacccatcattctctgagaactaccttggctgctgcagaatcgactcttccaaatacctgccttcagctcacgtggtgctcaccaaagccatagctttaaacccttccagcccatccacagctttcccagtccctgtcttgtgtacttacacagagtgccctcttgaaatcatgagggggtctcttcactcaccctttctatgtcccatgtcagacaccaggagttctcttacagggtagggtgtagccagaaactggtgagacacagatcacagagatgcctctgggggcactgggggtgggggagcagggggagtacagttgttctttctgtggattccttgttggtgagagctgcgcctgcttatctagagtgctgttcagtgtagtcgatctgggatgtgttctgggaaattcatcctttttgtacaggggaaagaaacacttttttttaccagattggctttccaaagacacgatagatggcagagcttaaggaatggaatgttcttataatggactacagacttcaaagtgattggcccattccaaaaggaaaatgggaatgctgttcatccatgtgagcatacttcacagtgatgaaaacctcaagactcgagatcccatagatcagagccgaacctacttttttgataacccctgtagtggtcttagagactagaaacaagatagtttgtagtgtgtgctccctaaaatctagaatagatttttactgaatagtggtatatatgatggtatatgtttcttaaaggtccaaacataataaagaaattaagacaaaaaaaaaaaaaaaaaaaaaaaaaaaaaaaaaaaaaaaaaaaaa

SEQ ID NO: 104 - protein, 411 aa, Mus musculus
MSKRPSYAPPPTPAPATQMPSTPGFVGYNPYSHLAYNNYRLGGNPGTNSRVTASSGITIPKPPKPPDKPLMPYMRYSRKVWDQVKASNPDLKLWEIGKIIGGMWRDLTDEEKQEYLNEYEAEKIEYNESMKAYHNSPAYLAYINAKSRAEAALEEESRQRQSRMEKGEPYMSIQPAEDPDDYDDGFSMKHTATARFQRNHRLISEILSESVVPDVRSVVTTARMQVLKRQVQSLMVHQRKLEAELLQIEERHQEKKRKFLESTDSFNNELKRLCGLKVEVDMEKIAAEIAQAEEQARKRQEEREKEAAEQAERSQSSMAPEEEQVANKAEEKKDEESIPMETEETHLEDTAESQQNGEEGTSTPEDKESGQEGVDSMEVEGTSDSNTGSESNSATVEEPPTDPVPEDEKKE

SEQ ID NO: 105 - DNA, 2348 bp, Homo sapiens
gtgctcccgccccccgggaatgaatggatgggcggcctcagcgcccgcccgaccgctgggaggaccgacccggcggggacctgctgggggcaggacccggggagcaagatggccactgtcatccctggccccctgagcctaggcgaggacttctaccgcgaggccatcgagcactgccgcagttacaacgcgcgcctgtgcgccgagcgcagcctgcgactgcccttcctcgactcgcagaccggcgtggcccagaacaactgctacatctggatggagaagacccaccgcgggccgggtttggccccgggacagatttacacgtaccccgcccgctgttggaggaagaaacggagactcaacatcctggaggaccccagactcaggccctgcgagtacaagatcgactgtgaagcacccctgaagaaggagggtggcctcccggaagggccggtcctcgaggctctactgtgtgcagagacgggggagaagaagattgagctgaaggaggaggagaccattatggactgtcagaaacagcagttgctggagtttccgcatgacctcgaggtggaagacttggaggatgacattcccaggaggaagaacagggccaaaggaaaggcatatggcatcgggggtctccggaaacgccaggacaccgcttccctggaggaccgagacaagccgtatgtctgtgatatctgtgggaaacggtataagaaccggccggggctcagctaccactacacccacacccacctggccgaggaggagggggaggagaacgccgaacgccacgccctgcccttccaccggaaaaacaaccataaacagttttacaaagaattggcctgggtccctgaggcacaaaggaaacacacagccaagaaggcgcccgacggcactgtcatccccaacggctactgtgacttctgcctggggggctccaagaagacggggtgtcccgaggacctcatctcctgtgcggactgtgggcgatcaggacacccctcgtgtttacaattcacggtgaacatgacggcagccgtgcggacctaccgctggcagtgcatcgagtgcaaatcctgcagcctgtgcggaacctccgagaacgacgaccagctgctgttttgtgatgactgcgatcggggttaccacatgtactgcctgagtccccccatggcggagcccccggaagggagctggagctgtcacctctgtctccggcacctgaaggaaaaggcttctgcttacatcaccctcacctaggccggctcggctcgccgcgactctggggtggtgctcgcctacctgcctctccgagctcctcaattctcccccaccctgaacatcccgcagggggagggggagagggggaagccgagagggggctgggccaccccctcccctctgtgcaagtggaatgtctgccctgtgggtgggtgggcccggccagggcctctccctccctccctccctctctgtcccttggcaaatggacaccaggggcttctcccctcaaagccataccccgcctctgggcgggcatggggggtggtgggtgccagccaggggcatggacagagcctttttctaaagaaaaagacaaaaagttaaaaaaaaaaaaaagaagaaaagaaaagaagttaatatatacaaagagtcctccaaggcctggctgggtggaggggcgctgctgagagtgtccaccgggcacccgcctctgccggccccccgccgggcgccccaaccccaatttctggagctgcagccgtcccgcgccccacccaaggtgggcgccttcccctcttgtgcccagggcggtgggcgtggtgtccacccgcccctcctggtgcccacggtggatactgcatgatgtgaaccttggttttgaactctgttcctgcccctccccgaccgccccagcctgtgcccgccccgtgcctgccgtggctggtgggtggcggtggtggggccgggtgggcccccgcccagcgcctgctggaatgagaagcacagactccgccacggactccttttctctccctcctcccgccccgccaggcctggcggcccccgcccccctcgctggccattttgggggagtgagggggcgtggttgtttcttgtggttgtgtgtgtttgttgttcgggttttaaaaaagggaaactgagactgcaggtgggggaggtggtgggttttggggggatgtcccctaatccaggagtgccccctcacttgtcaccgagtctcctctattgcctgcctctgctgtgaattaacttgttctgtgtattaaactgggcctgacccctctgcccacgaaaaaaaaaaaaaaaaaaaa

SEQ ID NO: 106 - protein, 414 aa, Homo sapiens
MGGLSARPTAGRTDPAGTCWGQDPGSKMATVIPGPLSLGEDFYREAIEHCRSYNARLCAERSLRLPFLDSQTGVAQNNCYIWMEKTHRGPGLAPGQIYTYPARCWRKKRRLNILEDPRLRPCEYKIDCEAPLKKEGGLPEGPVLEALLCAETGEKKIELKEEETIMDCQKQQLLEFPHDLEVEDLEDDIPRRKNRAKGKAYGIGGLRKRQDTASLEDRDKPYVCDICGKRYKNRPGLSYHYTHTHLAEEEGEENAERHALPFHRKNNHKQFYKELAWVPEAQRKHTAKKAPDGTVIPNGYCDFCLGGSKKTGCPEDLISCADCGRSGHPSCLQFTVNMTAAVRTYRWQCIECKSCSLCGTSENDDQLLFCDDCDRGYHMYCLSPPMAEPPEGSWSCHLCLRHLKEKASAYITLT

SEQ ID NO: 107 - DNA, 2246 bp, Homo sapiens
gtgctcccgccccccgggaatgaatggatgggcggcctcagcgcccgcccgaccgctgggaggaccgacccggcggggacctgctgggggcaggacccggggagcaagatggccactgtcatccctggccccctgagcctaggcgaggacttctaccgcgaggccatcgagcactgccgcagttacaacgcgcgcctgtgcgccgagcgcagcctgcgactgcccttcctcgactcgcagaccggcgtggcccagaacaactgctacatctggatggagaagacccaccgcgggccgggtttggccccgggacagatttacacgtaccccgcccgctgttggaggaagaaacggagactcaacatcctggaggaccccagactcaggccctgcgagtacaagatcgactgtgaagcacccctgaagaaggagggtggcctcccggaagggccggtcctcgaggctctactgtgtgcagagacgggggagaagaagattgagctgaaggaggaggagaccattatggactgtcagaaacagcagttgctggagtttccgcatgacctcgaggtggaagacttggaggatgacattcccaggaggaagaacagggccaaaggaaaggcatatggcatcgggggtctccggaaacgccaggacaccgcttccctggaggaccgagacaagccgtatgtctgtgataagttttacaaagaattggcctgggtccctgaggcacaaaggaaacacacagccaagaaggcgcccgacggcactgtcatccccaacggctactgtgacttctgcctggggggctccaagaagacggggtgtcccgaggacctcatctcctgtgcggactgtgggcgatcaggacacccctcgtgtttacaattcacggtgaacatgacggcagccgtgcggacctaccgctggcagtgcatcgagtgcaaatcctgcagcctgtgcggaacctccgagaacgacggtgccagctgggcgggtctcaccccccaggaccagctgctgttttgtgatgactgcgatcggggttaccacatgtactgcctgagtccccccatggcggagcccccggaagggagctggagctgtcacctctgtctccggcacctgaaggaaaaggcttctgcttacatcaccctcacctaggccggctcggctcgccgcgactctggggtggtgctcgcctacctgcctctccgagctcctcaattctcccccaccctgaacatcccgcagggggagggggagagggggaagccgagagggggctgggccaccccctcccctctgtgcaagtggaatgtctgccctgtgggtgggtgggcccggccagggcctctccctccctccctccctctctgtcccttggcaaatggacaccaggggcttctcccctcaaagccataccccgcctctgggcgggcatggggggtggtgggtgccagccaggggcatggacagagcctttttctaaagaaaaagacaaaaagttaaaaaaaaaaaaaagaagaaaagaaaagaagttaatatatacaaagagtcctccaaggcctggctgggtggaggggcgctgctgagagtgtccaccgggcacccgcctctgccggccccccgccgggcgccccaaccccaatttctggagctgcagccgtcccgcgccccacccaaggtgggcgccttcccctcttgtgcccagggcggtgggcgtggtgtccacccgcccctcctggtgcccacggtggatactgcatgatgtgaaccttggttttgaactctgttcctgcccctccccgaccgccccagcctgtgcccgccccgtgcctgccgtggctggtgggtggcggtggtggggccgggtgggcccccgcccagcgcctgctggaatgagaagcacagactccgccacggactccttttctctccctcctcccgccccgccaggcctggcggcccccgcccccctcgctggccattttgggggagtgagggggcgtggttgtttcttgtggttgtgtgtgtttgttgttcgggttttaaaaaagggaaactgagactgcaggtgggggaggtggtgggttttggggggatgtcccctaatccaggagtgccccctcacttgtcaccgagtctcctctattgcctgcctctgctgtgaattaacttgttctgtgtattaaactgggcctgacccctctgcccacgaaaaaaaaaaaaaaaaaaaa

SEQ ID NO: 108 - protein, 380 aa, Homo sapiens
MGGLSARPTAGRTDPAGTCWGQDPGSKMATVIPGPLSLGEDFYREAIEHCRSYNARLCAERSLRLPFLDSQTGVAQNNCYIWMEKTHRGPGLAPGQIYTYPARCWRKKRRLNILEDPRLRPCEYKIDCEAPLKKEGGLPEGPVLEALLCAETGEKKIELKEEETIMDCQKQQLLEFPHDLEVEDLEDDIPRRKNRAKGKAYGIGGLRKRQDTASLEDRDKPYVCDKFYKELAWVPEAQRKHTAKKAPDGTVIPNGYCDFCLGGSKKTGCPEDLISCADCGRSGHPSCLQFTVNMTAAVRTYRWQCIECKSCSLCGTSENDGASWAGLTPQDQLLFCDDCDRGYHMYCLSPPMAEPPEGSWSCHLCLRHLKEKASAYITLT

SEQ ID NO: 109 - DNA, 2362 bp, Homo sapiens
cgcagccccaagaatgaatgaaatcgtagcgcgctgggcggcagagcgggcggcgcaggccgggctgggcccgcgcgcggcggcagcggcgccccgggccggaggcggcccagccgagcgggccatggccaccgccattcagaacccgctcaagtcgcgaggacttctaccgcgaggccatcgagcactgccgcagttacaacgcgcgcctgtgcgccgagcgcagcctgcgactgcccttcctcgactcgcagaccggcgtggcccagaacaactgctacatctggatggagaagacccaccgcgggccgggtttggccccgggacagatttacacgtaccccgcccgctgttggaggaagaaacggagactcaacatcctggaggaccccagactcaggccctgcgagtacaagatcgactgtgaagcacccctgaagaaggagggtggcctcccggaagggccggtcctcgaggctctactgtgtgcagagacgggggagaagaagattgagctgaaggaggaggagaccattatggactgtcagaaacagcagttgctggagtttccgcatgacctcgaggtggaagacttggaggatgacattcccaggaggaagaacagggccaaaggaaaggcatatggcatcgggggtctccggaaacgccaggacaccgcttccctggaggaccgagacaagccgtatgtctgtgatatctgtgggaaacggtataagaaccggccggggctcagctaccactacacccacacccacctggccgaggaggagggggaggagaacgccgaacgccacgccctgcccttccaccggaaaaacaaccataaacagttttacaaagaattggcctgggtccctgaggcacaaaggaaacacacagccaagaaggcgcccgacggcactgtcatccccaacggctactgtgacttctgcctggggggctccaagaagacggggtgtcccgaggacctcatctcctgtgcggactgtgggcgatcaggacacccctcgtgtttacaattcacggtgaacatgacggcagccgtgcggacctaccgctggcagtgcatcgagtgcaaatcctgcagcctgtgcggaacctccgagaacgacgaccagctgctgttttgtgatgactgcgatcggggttaccacatgtactgcctgagtccccccatggcggagcccccggaagggagctggagctgtcacctctgtctccggcacctgaaggaaaaggcttctgcttacatcaccctcacctaggccggctcggctcgccgcgactctggggtggtgctcgcctacctgcctctccgagctcctcaattctcccccaccctgaacatcccgcagggggagggggagagggggaagccgagagggggctgggccaccccctcccctctgtgcaagtggaatgtctgccctgtgggtgggtgggcccggccagggcctctccctccctccctccctctctgtcccttggcaaatggacaccaggggcttctcccctcaaagccataccccgcctctgggcgggcatggggggtggtgggtgccagccaggggcatggacagagcctttttctaaagaaaaagacaaaaagttaaaaaaaaaaaaaagaagaaaagaaaagaagttaatatatacaaagagtcctccaaggcctggctgggtggaggggcgctgctgagagtgtccaccgggcacccgcctctgccggccccccgccgggcgccccaaccccaatttctggagctgcagccgtcccgcgccccacccaaggtgggcgccttcccctcttgtgcccagggcggtgggcgtggtgtccacccgcccctcctggtgcccacggtggatactgcatgatgtgaaccttggttttgaactctgttcctgcccctccccgaccgccccagcctgtgcccgccccgtgcctgccgtggctggtgggtggcggtggtggggccgggtgggcccccgcccagcgcctgctggaatgagaagcacagactccgccacggactccttttctctccctcctcccgccccgccaggcctggcggcccccgcccccctcgctggccattttgggggagtgagggggcgtggttgtttcttgtggttgtgtgtgtttgttgttcgggttttaaaaaagggaaactgagactgcaggtgggggaggtggtgggttttggggggatgtcccctaatccaggagtgccccctcacttgtcaccgagtctcctctattgcctgcctctgctgtgaattaacttgttctgtgtattaaactgggcctgacccctctgcccacgaaaaaaaaaaaaaaaaaaaa

SEQ ID NO: 110 - protein, 332 aa, Homo sapiens
MEKTHRGPGLAPGQIYTYPARCWRKKRRLNILEDPRLRPCEYKIDCEAPLKKEGGLPEGPVLEALLCAETGEKKIELKEEETIMDCQKQQLLEFPHDLEVEDLEDDIPRRKNRAKGKAYGIGGLRKRQDTASLEDRDKPYVCDICGKRYKNRPGLSYHYTHTHLAEEEGEENAERHALPFHRKNNHKQFYKELAWVPEAQRKHTAKKAPDGTVIPNGYCDFCLGGSKKTGCPEDLISCADCGRSGHPSCLQFTVNMTAAVRTYRWQCIECKSCSLCGTSENDDQLLFCDDCDRGYHMYCLSPPMAEPPEGSWSCHLCLRHLKEKASAYITLT

SEQ ID NO: 111 - DNA, 2378 bp, Homo sapiens
gtgctcccgccccccgggaatgaatggatgggcggcctcagcgcccgcccgaccgctgggaggaccgacccggcggggacctgctgggggcaggacccggggagcaagatggccactgtcatccctggccccctgagcctaggcgaggacttctaccgcgaggccatcgagcactgccgcagttacaacgcgcgcctgtgcgccgagcgcagcctgcgactgcccttcctcgactcgcagaccggcgtggcccagaacaactgctacatctggatggagaagacccaccgcgggccgggtttggccccgggacagatttacacgtaccccgcccgctgttggaggaagaaacggagactcaacatcctggaggaccccagactcaggccctgcgagtacaagatcgactgtgaagcacccctgaagaaggagggtggcctcccggaagggccggtcctcgaggctctactgtgtgcagagacgggggagaagaagattgagctgaaggaggaggagaccattatggactgtcagaaacagcagttgctggagtttccgcatgacctcgaggtggaagacttggaggatgacattcccaggaggaagaacagggccaaaggaaaggcatatggcatcgggggtctccggaaacgccaggacaccgcttccctggaggaccgagacaagccgtatgtctgtgatatctgtgggaaacggtataagaaccggccggggctcagctaccactacacccacacccacctggccgaggaggagggggaggagaacgccgaacgccacgccctgcccttccaccggaaaaacaaccataaacagttttacaaagaattggcctgggtccctgaggcacaaaggaaacacacagccaagaaggcgcccgacggcactgtcatccccaacggctactgtgacttctgcctggggggctccaagaagacggggtgtcccgaggacctcatctcctgtgcggactgtgggcgatcaggacacccctcgtgtttacaattcacggtgaacatgacggcagccgtgcggacctaccgctggcagtgcatcgagtgcaaatcctgcagcctgtgcggaacctccgagaacgacggtgccagctgggcgggtctcaccccccaggaccagctgctgttttgtgatgactgcgatcggggttaccacatgtactgcctgagtccccccatggcggagcccccggaagggagctggagctgtcacctctgtctccggcacctgaaggaaaaggcttctgcttacatcaccctcacctaggccggctcggctcgccgcgactctggggtggtgctcgcctacctgcctctccgagctcctcaattctcccccaccctgaacatcccgcagggggagggggagagggggaagccgagagggggctgggccaccccctcccctctgtgcaagtggaatgtctgccctgtgggtgggtgggcccggccagggcctctccctccctccctccctctctgtcccttggcaaatggacaccaggggcttctcccctcaaagccataccccgcctctgggcgggcatggggggtggtgggtgccagccaggggcatggacagagcctttttctaaagaaaaagacaaaaagttaaaaaaaaaaaaaagaagaaaagaaaagaagttaatatatacaaagagtcctccaaggcctggctgggtggaggggcgctgctgagagtgtccaccgggcacccgcctctgccggccccccgccgggcgccccaaccccaatttctggagctgcagccgtcccgcgccccacccaaggtgggcgccttcccctcttgtgcccagggcggtgggcgtggtgtccacccgcccctcctggtgcccacggtggatactgcatgatgtgaaccttggttttgaactctgttcctgcccctccccgaccgccccagcctgtgcccgccccgtgcctgccgtggctggtgggtggcggtggtggggccgggtgggcccccgcccagcgcctgctggaatgagaagcacagactccgccacggactccttttctctccctcctcccgccccgccaggcctggcggcccccgcccccctcgctggccattttgggggagtgagggggcgtggttgtttcttgtggttgtgtgtgtttgttgttcgggttttaaaaaagggaaactgagactgcaggtgggggaggtggtgggttttggggggatgtcccctaatccaggagtgccccctcacttgtcaccgagtctcctctattgcctgcctctgctgtgaattaacttgttctgtgtattaaactgggcctgacccctctgcccacgaaaaaaaaaaaaaaaaaaaa

SEQ ID NO: 112 - protein, 424 aa, Homo sapiens
MGGLSARPTAGRTDPAGTCWGQDPGSKMATVIPGPLSLGEDFYREAIEHCRSYNARLCAERSLRLPFLDSQTGVAQNNCYIWMEKTHRGPGLAPGQIYTYPARCWRKKRRLNILEDPRLRPCEYKIDCEAPLKKEGGLPEGPVLEALLCAETGEKKIELKEEETIMDCQKQQLLEFPHDLEVEDLEDDIPRRKNRAKGKAYGIGGLRKRQDTASLEDRDKPYVCDICGKRYKNRPGLSYHYTHTHLAEEEGEENAERHALPFHRKNNHKQFYKELAWVPEAQRKHTAKKAPDGTVIPNGYCDFCLGGSKKTGCPEDLISCADCGRSGHPSCLQFTVNMTAAVRTYRWQCIECKSCSLCGTSENDGASWAGLTPQDQLLFCDDCDRGYHMYCLSPPMAEPPEGSWSCHLCLRHLKEKASAYITLT

SEQ ID NO: 113 - DNA, 2329 bp, Homo sapiens
gaaatcgtagcgcgctgggcggcagagcgggcggcgcaggccgggctgggcccgcgcgcggcggcagcggcgccccgggccggaggcggcccagccgagcgggccatggccaccgccattcagaacccgctcaagtccctaggcgaggacttctaccgcgaggccatcgagcactgccgcagttacaacgcgcgcctgtgcgccgagcgcagcctgcgactgcccttcctcgactcgcagaccggcgtggcccagaacaactgctacatctggatggagaagacccaccgcgggccgggtttggccccgggacagatttacacgtaccccgcccgctgttggaggaagaaacggagactcaacatcctggaggaccccagactcaggccctgcgagtacaagatcgactgtgaagcacccctgaagaaggagggtggcctcccggaagggccggtcctcgaggctctactgtgtgcagagacgggggagaagaagattgagctgaaggaggaggagaccattatggactgtcagaaacagcagttgctggagtttccgcatgacctcgaggtggaagacttggaggatgacattcccaggaggaagaacagggccaaaggaaaggcatatggcatcgggggtctccggaaacgccaggacaccgcttccctggaggaccgagacaagccgtatgtctgtgatatctgtgggaaacggtataagaaccggccggggctcagctaccactacacccacacccacctggccgaggaggagggggaggagaacgccgaacgccacgccctgcccttccaccggaaaaacaaccataaacagttttacaaagaattggcctgggtccctgaggcacaaaggaaacacacagccaagaaggcgcccgacggcactgtcatccccaacggctactgtgacttctgcctggggggctccaagaagacggggtgtcccgaggacctcatctcctgtgcggactgtgggcgatcaggacacccctcgtgtttacaattcacggtgaacatgacggcagccgtgcggacctaccgctggcagtgcatcgagtgcaaatcctgcagcctgtgcggaacctccgagaacgacgaccagctgctgttttgtgatgactgcgatcggggttaccacatgtactgcctgagtccccccatggcggagcccccggaagggagctggagctgtcacctctgtctccggcacctgaaggaaaaggcttctgcttacatcaccctcacctaggccggctcggctcgccgcgactctggggtggtgctcgcctacctgcctctccgagctcctcaattctcccccaccctgaacatcccgcagggggagggggagagggggaagccgagagggggctgggccaccccctcccctctgtgcaagtggaatgtctgccctgtgggtgggtgggcccggccagggcctctccctccctccctccctctctgtcccttggcaaatggacaccaggggcttctcccctcaaagccataccccgcctctgggcgggcatggggggtggtgggtgccagccaggggcatggacagagcctttttctaaagaaaaagacaaaaagttaaaaaaaaaaaaaagaagaaaagaaaagaagttaatatatacaaagagtcctccaaggcctggctgggtggaggggcgctgctgagagtgtccaccgggcacccgcctctgccggccccccgccgggcgccccaaccccaatttctggagctgcagccgtcccgcgccccacccaaggtgggcgccttcccctcttgtgcccagggcggtgggcgtggtgtccacccgcccctcctggtgcccacggtggatactgcatgatgtgaaccttggttttgaactctgttcctgcccctccccgaccgccccagcctgtgcccgccccgtgcctgccgtggctggtgggtggcggtggtggggccgggtgggcccccgcccagcgcctgctggaatgagaagcacagactccgccacggactccttttctctccctcctcccgccccgccaggcctggcggcccccgcccccctcgctggccattttgggggagtgagggggcgtggttgtttcttgtggttgtgtgtgtttgttgttcgggttttaaaaaagggaaactgagactgcaggtgggggaggtggtgggttttggggggatgtcccctaatccaggagtgccccctcacttgtcaccgagtctcctctattgcctgcctctgctgtgaattaacttgttctgtgtattaaactgggcctgacccctctgcccacga

SEQ ID NO: 114 - protein, 388 aa, Homo sapiens
MATAIQNPLKSLGEDFYREAIEHCRSYNARLCAERSLRLPFLDSQTGVAQNNCYIWMEKTHRGPGLAPGQIYTYPARCWRKKRRLNILEDPRLRPCEYKIDCEAPLKKEGGLPEGPVLEALLCAETGEKKIELKEEETIMDCQKQQLLEFPHDLEVEDLEDDIPRRKNRAKGKAYGIGGLRKRQDTASLEDRDKPYVCDICGKRYKNRPGLSYHYTHTHLAEEEGEENAERHALPFHRKNNHKQFYKELAWVPEAQRKHTAKKAPDGTVIPNGYCDFCLGGSKKTGCPEDLISCADCGRSGHPSCLQFTVNMTAAVRTYRWQCIECKSCSLCGTSENDDQLLFCDDCDRGYHMYCLSPPMAEPPEGSWSCHLCLRHLKEKASAYITLT

SEQ ID NO: 115 - DNA, 2278 bp, Mus musculus
gcaggccgggctgggcccgcgctcagcggcagcagcagcggcgccccgggccggaggcggcccagccgagcgggccatggccaccgccattcagaacccgctcaagtcccttggcgaggacttctaccgggaggccatcgagcactgtcgcagctacaacgcgcgcctgtgtgccgagcgcagcctgcgcctgcctttcctcgactcgcagaccggagtggcccagaacaactgctacatctggatggagaagacccaccgcgggcctggtttggccccgggacagatctacacttaccccgcccgctgttggaggaagaaacggagactcaacatcctggaggaccccaggctccggccctgcgagtacaagatcgattgtgaggcacctctgaagaaggagggtggcctcccggaagggccagtcctcgaggctctgctgtgtgctgagactggagagaagaaagtggagctgaaggaggaggagaccatcatggactgtcagaaacagcagttgctggagtttccgcatgatctcgaggtagaagacttggaggaagacattcccaggaggaagaacagggcaagaggaaaggcatatggcattggaggtctccgcaaacgccaggacaccgcatccctggaggaccgagacaagccgtacgtctgtgatatctgtgggaagagatataagaaccggccaggactcagctaccattacacccacacccacctggctgaggaggagggggaggagcacactgaacgccacgccctgcctttccaccggaaaaacaaccataaacagttttacaaagaattggcctgggtccccgaggcacagaggaaacacacagccaagaaagcaccagatggcactgtcatccccaatggctactgtgacttttgcctggggggctccaagaagactgggtgtcccgaggacctcatctcctgtgcggactgtgggcgatcaggacatccctcgtgtttacagttcacggtgaacatgaccgcggctgtgcggacctaccgctggcagtgcattgaatgcaagtcctgcagcctgtgtggcacctcggagaatgacgaccagctgctgttctgtgatgactgcgatcgaggttaccacatgtactgcctgagccctcccatggcggagcccccggaagggagctggagctgccacctctgtctccggcacttgaaggaaaaggcctctgcttacatcaccctgacctaggcccggctctgcttccccaggatctttgggtggtgctatctcctgcctcttggagctcctggcgctccccacccggtgtccccagtggaagggatggggtgaagcccagagtgggggggggcaaggtgttctccctctgcaagtggaatgttaccctgtgggtggctgggtccaacagggtccctcctgtcccccctcttcatcccttgacaaatgggcaccaggcttctgctctcctcaaagccatacccccgcctttgggcgggcatagaggggtagtggatgctagccagcagcacggaaagagcctttttctaaagaaaaagacaaaacgtggaaaaaaaagggaaaaaaattaatatatacaaagagtcctataaagcctggctgggtggagaggcactgttgagtgtctgctggggacctgactttaccagtttcctgaatggcgcctccccacctcatttctggagttgcaatggtctcaactcccatctgaggtgggtaccaccccttcctcagtacccaccgtggatactgcatgtgaactatggttttgaactcttcctcctcctccttgagagccccgccctgcgcccgcgtggtgcctgcctgccaggcctggggcgtgcagccggggaggcgggtggggtgaggcaggcaggcagccagccccctgcagtgagaagcacagattgcaatggactcagttttttttttttttttttttttttttcctttctcccttcccacccctttccttccctacccagccaggctgggctgcctcctgcccccctcgctagccatttgggggtggcaagggggtgtggttgtttctcgtggttgtgtgtgtttgttgttcgggtttttaaaaggggaaattgagactgcaagtgggggaggtggagggtctgggggagtctgcccccaatccaggagtaccccccttgccaccaagtctcctttattgcctgcctctgctgtgaattaacttgttctgtgtattaaactgggcctgacccctctgcccac

SEQ ID NO: 116 - protein, 388 aa, Mus musculus
MATAIQNPLKSLGEDFYREAIEHCRSYNARLCAERSLRLPFLDSQTGVAQNNCYIWMEKTHRGPGLAPGQIYTYPARCWRKKRRLNILEDPRLRPCEYKIDCEAPLKKEGGLPEGPVLEALLCAETGEKKVELKEEETIMDCQKQQLLEFPHDLEVEDLEEDIPRRKNRARGKAYGIGGLRKRQDTASLEDRDKPYVCDICGKRYKNRPGLSYHYTHTHLAEEEGEEHTERHALPFHRKNNHKQFYKELAWVPEAQRKHTAKKAPDGTVIPNGYCDFCLGGSKKTGCPEDLISCADCGRSGHPSCLQFTVNMTAAVRTYRWQCIECKSCSLCGTSENDDQLLFCDDCDRGYHMYCLSPPMAEPPEGSWSCHLCLRHLKEKASAYITLT

SEQ ID NO: 117 - DNA, 2545 bp, Homo sapiens
agtgctcgctctagtgcgcgcgcccggacggcgcctgcgcagagggcaaggaacctggtaccccggtgcggtcccggcgcctgcgcgctgcggactgtggggcttctcggcccgaggcagaggaacagggaagatggcggctgtggtggagaatgtagtgaagctccttggggagcagtactacaaagatgccatggagcagtgccacaattacaatgctcgcctctgtgctgagcgcagcgtgcgcctgcctttcttggactcacagaccggagtagcccagagcaattgttacatctggatggaaaagcgacaccggggtccaggattggcctccggacagctgtactcctaccctgcccggcgctggcggaaaaagcggcgagcccatccccctgaggatccacgactttccttcccatctattaagccagacacagaccagaccctgaagaaggaggggctgatctctcaggatggcagtagtttagaggctctgttgcgcactgaccccctggagaagcgaggtgccccggatccccgagttgatgatgacagcctgggcgagtttcctgtgaccaacagtcgagcgcgaaagcggatcctagaaccagatgacttcctggatgacctcgatgatgaagactatgaagaagatactcccaagcgtcggggaaaggggaaatccaagggtaagggtgtgggcagtgcccgtaagaagctggatgcttccatcctggaggaccgggataagccctatgcctgtgacatttgtggaaaacgttacaagaaccgaccaggcctcagttaccactatgcccactcccacttggctgaggaggagggcgaggacaaggaagactctcaaccacccactcctgtttcccagaggtctgaggagcagaaatccaaaaagggtcctgatggattggccttgcccaacaactactgtgacttctgcctgggggactcaaagattaacaagaagacgggacaacccgaggagctggtgtcctgttctgactgtggccgctcagggcatccatcttgcctccaatttacccccgtgatgatggcggcagtgaagacataccgctggcagtgcatcgagtgcaaatgttgcaatatctgcggcacctccgagaatgacgaccagttgctcttctgtgatgactgcgatcgtggctaccacatgtactgtctcaccccgtccatgtctgagccccctgaaggaagttggagctgccacctgtgtctggacctgttgaaagagaaagcttccatctaccagaaccagaactcctcttgatgtggccacccacctgctccccgacatatctaaggctgtttctctcctccacttcatatttcatacccatctttcccttcttcctcctctccttcacaaatccagagaaccttggggtggttgtgccagcctgcctttggcagctgcaagctgaggtggcagctctgaccacctctggccccaggccctcagggagaaaggagcaacacactgcccctaggcgtgcgtgtggcccagtttctctctgctctccattaagtgcattcactctgcttgccttgggcccagcccctggtgatcacagggttcaaacagtgtcctcctagaaagagtgggagagcagctcacttctctgtgttctgcctcccctctggtctccagagttttcctgtcctctagaggcaagccaggccagggagctgggagcgagcaagctgaggccacgtccacaaggagcttttcatgcccctgtgccgcatagcctcacctctttcctccagagtggctctctgcggccctgtgttcctgctacagagtgttcttttctggagtcaggatgttctcggtcaccctcctggttctgccctgtcccattccaccccaccccagggggaacagtagcttcaccttgttattcccattgctctcctggctcactcttacggtcggtctccagtgactgaagcattccccacccttggaatttctcatcttctgcctcccttcctactccttttggttttgtggggagaggggaaggatcagggggccaggccagcagctcgggggccacaaggagatggataatgtgcctgttttttaacacaacaaaaaagcctacctccaaaatcccctttttgttcttcctggacctgggcattcagcctcctgctcttaactgaattgggagcctctgccacctgccccgtgtatcctggctctcagctcatggggaagccacatagacatccctttcttcccttgcacgctcgctagcagctggtaaggtcttcacaccctgattcctcaagttttctgcttagtggcactgacattaagtagtggggggacagtccatgccaggacaccctggagtagccttcccccttggccgtgggcaggccctaactcactgtcgctttggagttgaggtgtcttttttttttctttctttagttcctgtattctaaacattagtaaaaataaatgtttttacacagaaaaaaaaaaaaaaaa

SEQ ID NO: 118 - protein, 391 aa, Homo sapiens
MAAVVENVVKLLGEQYYKDAMEQCHNYNARLCAERSVRLPFLDSQTGVAQSNCYIWMEKRHRGPGLASGQLYSYPARRWRKKRRAHPPEDPRLSFPSIKPDTDQTLKKEGLISQDGSSLEALLRTDPLEKRGAPDPRVDDDSLGEFPVTNSRARKRILEPDDFLDDLDDEDYEEDTPKRRGKGKSKGKGVGSARKKLDASILEDRDKPYACDICGKRYKNRPGLSYHYAHSHLAEEEGEDKEDSQPPTPVSQRSEEQKSKKGPDGLALPNNYCDFCLGDSKINKKTGQPEELVSCSDCGRSGHPSCLQFTPVMMAAVKTYRWQCIECKCCNICGTSENDDQLLFCDDCDRGYHMYCLTPSMSEPPEGSWSCHLCLDLLKEKASIYQNQNSS

SEQ ID NO: 119 - DNA, 3897 bp, Homo sapiens
agtgctcgctctagtgcgcgcgcccggacggcgcctgcgcagagggcaaggaacctggtaccccggtgcggtcccggcgcctgcgcgctgcggactgtggggcttctcggcccgaggcagaggaacagggaagatggcggctgtggtggagaatgtagtgaagctccttggggagcagtactacaaagatgccatggagcagtgccacaattacaatgctcgcctctgtgctgagcgcagcgtgcgcctgcctttcttggactcacagaccggagtagcccagagcaattgttacatctggatggaaaagcgacaccggggtccaggattggcctccggacagctgtactcctaccctgcccggcgctggcggaaaaagcggcgagcccatccccctgaggatccacgactttccttcccatctattaagccagacacagaccagaccctgaagaaggaggggctgatctctcaggatggcagtagtttagaggctctgttgcgcactgaccccctggagaagcgaggtgccccggatccccgagttgatgatgacagcctgggcgagtttcctgtgaccaacagtcgagcgcgaaagcggatcctagaaccagatgacttcctggatgacctcgatgatgaagactatgaagaagatactcccaagcgtcggggaaaggggaaatccaagggtaagggtgtgggcagtgcccgtaagaagctggatgcttccatcctggaggaccgggataagccctatgcctgtgacaatagtttcaaacaaaagcatacctcgaaagcgccccagagagtttgtggaaaacgttacaagaaccgaccaggcctcagttaccactatgcccactcccacttggctgaggaggagggcgaggacaaggaagactctcaaccacccactcctgtttcccagaggtctgaggagcagaaatccaaaaagggtcctgatggattggccttgcccaacaactactgtgacttctgcctgggggactcaaagattaacaagaagacgggacaacccgaggagctggtgtcctgttctgactgtggccgctcagggcatccatcttgcctccaatttacccccgtgatgatggcggcagtgaagacataccgctggcagtgcatcgagtgcaaatgttgcaatatctgcggcacctccgagaatgacgaccagttgctcttctgtgatgactgcgatcgtggctaccacatgtactgtctcaccccgtccatgtctgagccccctgaaggaagttggagctgccacctgtgtctggacctgttgaaagagaaagcttccatctaccagaaccagaactcctcttgatgtggccacccacctgctccccgacatatctaaggctgtttctctcctccacttcatatttcatacccatctttcccttcttcctcctctccttcacaaatccagagaaccttggggtggttgtgccagcctgcctttggcagctgcaagctgaggtggcagctctgaccacctctggccccaggccctcagggagaaaggagcaacacactgcccctaggcgtgcgtgtggcccagtttctctctgctctccattaagtgcattcactctgcttgccttgggcccagcccctggtgatcacagggttcaaacagtgtcctcctagaaagagtgggagagcagctcacttctctgtgttctgcctcccctctggtctccagagttttcctgtcctctagaggcaagccaggccagggagctgggagcgagcaagctgaggccacgtccacaaggagcttttcatgcccctgtgccgcatagcctcacctctttcctccagagtggctctctgcggccctgtgttcctgctacagagtgttcttttctggagtcaggatgttctcggtcaccctcctggttctgccctgtcccattccaccccaccccagggggaacagtagcttcaccttgttattcccattgctctcctggctcactcttacggtcggtctccagtgactgaagcattccccacccttggaatttctcatcttctgcctcccttcctactccttttggttttgtggggagaggggaaggatcagggggccaggccagcagctcgggggccacaaggagatggataatgtgcctgttttttaacacaacaaaaaagcctacctccaaaatcccctttttgttcttcctggacctgggcattcagcctcctgctcttaactgaattgggagcctctgccacctgccccgtgtatcctggctctcagctcatggggaagccacatagacatccctttcttcccttgcacgctcgctagcagctggtaaggtcttcacaccctgattcctcaagttttctgcttagtggcactgacattaagtagtggggggacagtccatgccaggacaccctggagtagccttcccccttggccgtgggcaggccctaactcactgtcgctttggagttgaggtgtcttttttttttctttctttagttcctgtattctaaacattagtaaaaataaatgtttttacacagagccctctgctggatggtttatctcctgcctttctccattaagaaggccatttcatcctaagatttccatgatggtggtttttttttttaatgttttgaaatacagcttttttccccccaaattaaaatttttttgtggaaccccaatatgtaaagcgaatataaaattggttattttgttttgttacataaattcaagtttataacaattctttgttataaagaacaatgaagctgttttgatcaatacaaaatttgggttaaaatcaactttaacatctatttttatgtttcagttgatttggagaattctcctagtcttggatacatagatggaagtgatgacaggtttataacagttgaccttgcaatctcagacatttaaaacaggaccagaagtttatataaatataattaataagcaaactaatgacatcaccatgggacacacacaaaagttcttgcaggagcagggtctgtgtggcttcagttgcctgcagcgctcccaggccagagcaagtgctctaggatctgaactgcccgcagtgcagccctgcagcctttcccagggcacgttgatgtgcacacagtttccctgaaggcaaagtgaacatgtggagagcttacgtggcagcgcgtatgtcttcagtgtgtgttttagaagtccaactgttgtttttatgtttttaaaggaaagatttgaatcaagcagttatgggccccctgaagtatccttttttctagaacattctgaaagtcatccttgcctatgggaagcctaggccggcctgcactgttatgttcaataaataagcagggtgctctgggctggggattgtgtgaggagcagagcgcagcccgtcctcatgcttttccactgaagtaggccaggcagagagggagtacagcaatggatgcgctttggcagctgagtagtccgagagccagaaaagaaatgtggaaaataagaacgctgtagcaggcctaggtgaggaaatttaggaagggtttgcgggaggtaggatttgagatgggtcttggagagttggacagtgtcagccggtaggacgggggtgcggacggaagcctgtgaggaaggcagaggatgcggagctgtgagcggagggagcagcgaggctggagagcagctgggctgcgggtcaagacgtctgcgtttaattcgggactgaaggttagcagggaagggaacgatgccagatcttgagtttaagaacttgaatcttgtaaagtaccaaatctaataaaatactcgtcctaaataaaaaaaaaaaaaaaaaaaaaaaaaaaaaaaaaaaaaaaaaaaaa

SEQ ID NO: 120 - protein, 405 aa, Homo sapiens
MAAVVENVVKLLGEQYYKDAMEQCHNYNARLCAERSVRLPFLDSQTGVAQSNCYIWMEKRHRGPGLASGQLYSYPARRWRKKRRAHPPEDPRLSFPSIKPDTDQTLKKEGLISQDGSSLEALLRTDPLEKRGAPDPRVDDDSLGEFPVTNSRARKRILEPDDFLDDLDDEDYEEDTPKRRGKGKSKGKGVGSARKKLDASILEDRDKPYACDNSFKQKHTSKAPQRVCGKRYKNRPGLSYHYAHSHLAEEEGEDKEDSQPPTPVSQRSEEQKSKKGPDGLALPNNYCDFCLGDSKINKKTGQPEELVSCSDCGRSGHPSCLQFTPVMMAAVKTYRWQCIECKCCNICGTSENDDQLLFCDDCDRGYHMYCLTPSMSEPPEGSWSCHLCLDLLKEKASIYQNQNSS

SEQ ID NO: 121 - DNA, 3356 bp, Mus musculus
cctgcgcagagggtcgaggaccctgtgtcctgagaaggcttagcgcctgcgcgttgtaggtttcggggcctcccggcctgagggagaggaacagggaagatggcggctgtggtggagaatgtagtgaagctccttggcgagcaatactacaaagatgccatggaacagtgccacaattataacgcccgcctctgtgctgaacgtagtgtgcgcctgcctttcctggactcacagactggagtagcccagagcaattgttatatctggatggaaaagcgacaccggggaccaggattggcctctggacagttatactcctatcctgccagacgctggcggaaaaagcgccgagcccacccacctgaggatcccaggctttctttcccatcgattaaaccagacactgaccagactctgaagaaagaggggcttatctctcaggatggcagcagtttagaggctctgttgcgtactgatcccctggagaaacggggtgccccagatccccgagttgacgatgacagcctgggcgagtttcctgttagcaacagtcgagcacggaagcggatcattgaacccgatgacttccttgatgaccttgatgatgaggactatgaagaagatacgccaaagcgtcgggggaaggggaagtccaagagtaagggtgtgagcagtgcccggaagaagctggatgcttccatcctggaggaccgggataagccctatgcctgtgacaatagtttcaaacaaaagcatacctcgaaagcgccccagagagtttgtggaaaacgttacaagaaccgacctggcctcagttaccactatgcccactcccacctggctgaagaggaaggagaggacaaagaagactcccgaccccccactcctgtgtcccagaggtctgaggagcagaaatccaagaaaggacctgatggattggccctgcctaacaactactgtgacttctgcctaggagactcaaaaatcaacaagaagacagggcagcccgaggagctagtgtcctgttccgactgtggccgctcagggcatccgtcctgcctgcagttcacccctgtgatgatggcggccgtgaagacctaccgctggcagtgcatcgaatgcaagtgctgcaacctctgcggcacgtcggagaacgatgaccagctacttttctgtgatgactgtgaccgtggctaccacatgtactgtctcactccttccatgtctgagcctcctgaaggaagttggagttgccacctgtgtctggatctgctgaaggagaaagcatccatctaccagaaccagaactcctcctgatgtgccacccagctcccctgcatctaaggccgttgctctcctctctaccttggtttccattgcccctctctcctctttcactctgtagtcctgccaacctccgttggcaacagcacagggaggtggcagctctgactgcctctagccccgagccctcagggagtaaggagcagcgtgctgctccagggctgacctgtgggtccaacttctctctgctctccaagaagtgcattcactctgcctgccttgggcctaagaccctggtgattacagggctcaaatggggtcctctgagaaggaatatgagagcagctcacttgtctcaagccttgcccacccctcttcccccaaaccccctttggtttccagggttttgccccagagatgagccaggctgggcctttcctggaagcagctggagtgagctggctgagtggcacttgccaggaccttttcataccctagttctgcttccctttgcctcctgccaaagcagtcccctgtcctctgtcatgctacatggggttctgtgcttgagctagaatgttctcgggcacctcctggctctgccctgtcccacaaagggacgagcagcttcaaacctgtcctccctgtgcttggtggcttgctcacaggtgcgctctggctacccagacatttcctatcctcagaacttcccatcttctgcccccatccttagtccctttgcttttgtagggagagggatagtgtcaggggctgggccagcagcttgggggccacagggagaagttggataatgtgcctgttttttaactcgataaaaaagcctacctccaaaattccctttttgttcttcctgaacctgggcattcagcctcctgtccttaactaaattaggagcctctgcctcctgcctgtgtatcctggctcccaggacacaggatggtcccctttccttgcacgctagctagtagctggtaaggtcttcacaccctgagttttctgtttcctgcttagtggcactgacattaagtaggaggggacagtcctctgcagtactctagagagtgggcttcccccttggctgtgggcaggccctaactgttttctgcaaagttgagggccccccctcgcatatttagttcctgtattcaaaacattagtaaaaataaacatttttacagagtcttctgctggacagtttgtctcttgactccttgttgaaaggttgtttcatttcaaacttacgacaatagggttttttgttggtggtggttggttgttttaaattgaaacaactttttctcccaaaatcaaagtttttgttaaactccaccatgtaaaattattttgttagttttgttatgtaaattcagatttataacaatttagtggtataaaggatgaagctaattaatacaaaaattgggttaaaatcaactttagcattttctctgtatctgtgcttttggctggttggaaagactttactcggtgtgaatatgtaggcggaggtgcggcagatctatggcactgcagtgtctcctggttaaagtgaacccagaagcttgtttgtgctttaaactccaaggagttatgagttaagcctggagagagagcgcagcagaggagaggatgctcgttgttcttgcagagggccaagtttggttcccagcactcaaatccggtggctcacaaccacctgtagctccagctccaggagctggggaggtcaactgtgctcctgcaaacacccacctgcccactcatcttcatccatctacaaacctaccagtgtcatcgtagaacaaaagaagccgagaggagagtaacctcagatcctgtcatctgatgaaccttttcattgcctgtcggattgctaagccaaagcagagttgcaaagccagaattgtccacagtgcagggtgtcatgtgcagaccgtgagtgagtttatatccagccagattagtacttggatgttatatagtggatcttgtatagctcacttggtatgtattaacattttaacttttttcttttaaagatttatttattt

SEQ ID NO: 122 - protein, 405 aa, Mus musculus
MAAVVENVVKLLGEQYYKDAMEQCHNYNARLCAERSVRLPFLDSQTGVAQSNCYIWMEKRHRGPGLASGQLYSYPARRWRKKRRAHPPEDPRLSFPSIKPDTDQTLKKEGLISQDGSSLEALLRTDPLEKRGAPDPRVDDDSLGEFPVSNSRARKRIIEPDDFLDDLDDEDYEEDTPKRRGKGKSKSKGVSSARKKLDASILEDRDKPYACDNSFKQKHTSKAPQRVCGKRYKNRPGLSYHYAHSHLAEEEGEDKEDSRPPTPVSQRSEEQKSKKGPDGLALPNNYCDFCLGDSKINKKTGQPEELVSCSDCGRSGHPSCLQFTPVMMAAVKTYRWQCIECKCCNLCGTSENDDQLLFCDDCDRGYHMYCLTPSMSEPPEGSWSCHLCLDLLKEKASIYQNQNSS

SEQ ID NO: 123 - DNA, 3314 bp, Mus musculus
cctgcgcagagggtcgaggaccctgtgtcctgagaaggcttagcgcctgcgcgttgtaggtttcggggcctcccggcctgagggagaggaacagggaagatggcggctgtggtggagaatgtagtgaagctccttggcgagcaatactacaaagatgccatggaacagtgccacaattataacgcccgcctctgtgctgaacgtagtgtgcgcctgcctttcctggactcacagactggagtagcccagagcaattgttatatctggatggaaaagcgacaccggggaccaggattggcctctggacagttatactcctatcctgccagacgctggcggaaaaagcgccgagcccacccacctgaggatcccaggctttctttcccatcgattaaaccagacactgaccagactctgaagaaagaggggcttatctctcaggatggcagcagtttagaggctctgttgcgtactgatcccctggagaaacggggtgccccagatccccgagttgacgatgacagcctgggcgagtttcctgttagcaacagtcgagcacggaagcggatcattgaacccgatgacttccttgatgaccttgatgatgaggactatgaagaagatacgccaaagcgtcgggggaaggggaagtccaagagtaagggtgtgagcagtgcccggaagaagctggatgcttccatcctggaggaccgggataagccctatgcctgtgacatttgtggaaaacgttacaagaaccgacctggcctcagttaccactatgcccactcccacctggctgaagaggaaggagaggacaaagaagactcccgaccccccactcctgtgtcccagaggtctgaggagcagaaatccaagaaaggacctgatggattggccctgcctaacaactactgtgacttctgcctaggagactcaaaaatcaacaagaagacagggcagcccgaggagctagtgtcctgttccgactgtggccgctcagggcatccgtcctgcctgcagttcacccctgtgatgatggcggccgtgaagacctaccgctggcagtgcatcgaatgcaagtgctgcaacctctgcggcacgtcggagaacgatgaccagctacttttctgtgatgactgtgaccgtggctaccacatgtactgtctcactccttccatgtctgagcctcctgaaggaagttggagttgccacctgtgtctggatctgctgaaggagaaagcatccatctaccagaaccagaactcctcctgatgtgccacccagctcccctgcatctaaggccgttgctctcctctctaccttggtttccattgcccctctctcctctttcactctgtagtcctgccaacctccgttggcaacagcacagggaggtggcagctctgactgcctctagccccgagccctcagggagtaaggagcagcgtgctgctccagggctgacctgtgggtccaacttctctctgctctccaagaagtgcattcactctgcctgccttgggcctaagaccctggtgattacagggctcaaatggggtcctctgagaaggaatatgagagcagctcacttgtctcaagccttgcccacccctcttcccccaaaccccctttggtttccagggttttgccccagagatgagccaggctgggcctttcctggaagcagctggagtgagctggctgagtggcacttgccaggaccttttcataccctagttctgcttccctttgcctcctgccaaagcagtcccctgtcctctgtcatgctacatggggttctgtgcttgagctagaatgttctcgggcacctcctggctctgccctgtcccacaaagggacgagcagcttcaaacctgtcctccctgtgcttggtggcttgctcacaggtgcgctctggctacccagacatttcctatcctcagaacttcccatcttctgcccccatccttagtccctttgcttttgtagggagagggatagtgtcaggggctgggccagcagcttgggggccacagggagaagttggataatgtgcctgttttttaactcgataaaaaagcctacctccaaaattccctttttgttcttcctgaacctgggcattcagcctcctgtccttaactaaattaggagcctctgcctcctgcctgtgtatcctggctcccaggacacaggatggtcccctttccttgcacgctagctagtagctggtaaggtcttcacaccctgagttttctgtttcctgcttagtggcactgacattaagtaggaggggacagtcctctgcagtactctagagagtgggcttcccccttggctgtgggcaggccctaactgttttctgcaaagttgagggccccccctcgcatatttagttcctgtattcaaaacattagtaaaaataaacatttttacagagtcttctgctggacagtttgtctcttgactccttgttgaaaggttgtttcatttcaaacttacgacaatagggttttttgttggtggtggttggttgttttaaattgaaacaactttttctcccaaaatcaaagtttttgttaaactccaccatgtaaaattattttgttagttttgttatgtaaattcagatttataacaatttagtggtataaaggatgaagctaattaatacaaaaattgggttaaaatcaactttagcattttctctgtatctgtgcttttggctggttggaaagactttactcggtgtgaatatgtaggcggaggtgcggcagatctatggcactgcagtgtctcctggttaaagtgaacccagaagcttgtttgtgctttaaactccaaggagttatgagttaagcctggagagagagcgcagcagaggagaggatgctcgttgttcttgcagagggccaagtttggttcccagcactcaaatccggtggctcacaaccacctgtagctccagctccaggagctggggaggtcaactgtgctcctgcaaacacccacctgcccactcatcttcatccatctacaaacctaccagtgtcatcgtagaacaaaagaagccgagaggagagtaacctcagatcctgtcatctgatgaaccttttcattgcctgtcggattgctaagccaaagcagagttgcaaagccagaattgtccacagtgcagggtgtcatgtgcagaccgtgagtgagtttatatccagccagattagtacttggatgttatatagtggatcttgtatagctcacttggtatgtattaacattttaacttttttcttttaaagatttatttattt

SEQ ID NO: 124 - protein, 391 aa, Mus musculus
MAAVVENVVKLLGEQYYKDAMEQCHNYNARLCAERSVRLPFLDSQTGVAQSNCYIWMEKRHRGPGLASGQLYSYPARRWRKKRRAHPPEDPRLSFPSIKPDTDQTLKKEGLISQDGSSLEALLRTDPLEKRGAPDPRVDDDSLGEFPVSNSRARKRIIEPDDFLDDLDDEDYEEDTPKRRGKGKSKSKGVSSARKKLDASILEDRDKPYACDICGKRYKNRPGLSYHYAHSHLAEEEGEDKEDSRPPTPVSQRSEEQKSKKGPDGLALPNNYCDFCLGDSKINKKTGQPEELVSCSDCGRSGHPSCLQFTPVMMAAVKTYRWQCIECKCCNLCGTSENDDQLLFCDDCDRGYHMYCLTPSMSEPPEGSWSCHLCLDLLKEKASIYQNQNSS

SEQ ID NO: 125 - DNA, 4077 bp, Homo sapiens
agacaatattctgttacattgtagcaaaatggcgactgtcattcacaaccccctgaaagcgctcggggaccagttctacaaggaagccattgagcactgccggagttacaactcacggctgtgtgcagagcgcagcgtgcgtcttcccttcctggactcacagactggggtggcccagaacaactgctacatctggatggagaagaggcaccgaggcccaggccttgccccgggccagctgtatacataccctgcccgctgctggcgcaagaagagacgattgcacccacctgaagatccaaaactgcggctgctggagataaaacctgaagtggagcttcccctgaagaaggatgggttcacctcagagagcaccacgctggaagccttgctccgtggcgagggggttgagaagaaggtggatgccagggaggaggaaagcatccaggaaatacagagggttttggaaaatgatgaaaatgtagaagaagggaatgaagaagaggatttggaagaggatattcccaagcgaaagaacaggactagaggacgggctcgcggctctgcagggggcaggaggaggcacgacgccgcctctcaggaagaccacgacaaaccttacgtctgtgacatctgtggcaagcgctacaagaaccgaccggggctcagctaccactatgctcacactcacctggccagcgaggagggggatgaagctcaagaccaggagactcggtccccacccaaccacagaaatgagaaccacaggccccagaaaggaccggatggaacagtcattcccaataactactgtgacttctgcttggggggctccaacatgaacaagaagagtgggcggcctgaagagctggtgtcctgcgcagactgtggacgctctgctcatttgggaggagaaggcaggaaggagaaggaggcagcggccgcagcacgtaccacggaggacttattcggttccacgtcagaaagtgacacgtcaactttccacggctttgatgaggacgatttggaagagcctcgctcctgtcgaggacgccgcagtggccggggttcgcccacagcagataaaaagggcagttgctaaacccacggaacagactctctgggcaattagccatccccctctgactttggtcattgtgctggttctgatatatattttttttaatgaaaggcaactttagattttccctctatccttgctttttttcccttcacctcccacgtgtccctccatccctccccccacccctctgttttgggtatgtacaacagaagcacaaactactgaaacaaaacaaaacagcagaatgagcgttcttccgagagatggcatcgtgatgcgctatttattttccatagaaataggaagttagacggattgtctcttttctgaggggagggggtctttttgacaggagcagagttgatgtcctcaattttcatatttattggcaaaaggaagagaagaggaactttgggttggaaacaaagaaccaataacattaaaacattattatttatatattctagctgttattagaatcagactttttttgcgagagagagagagagagagagagaagggaaatcaaagaaatcgaagcaatatcctgtttagaggcaagccgcccggtggggagaatttcctcaatgggagacggttgcactattctgtgccccacggagtttgcggctccccgcggcagacccctccctcattctcctccctgacctttccatcttcctctctgcttgcgagaaaatgtcagtagttccagagaagtcggggtgcctatgcctggcctccctccacacctgggccctgaccagccgcctcctgggctcctcctcctccgtcagtagagctgctgttttgttattgctggtttttcctcactttcctcctggcaaagaacgacttccaaatgcagggatggaatataagcagaacgtcatgggctcagcagtgactccaccacccgaggccgaggccgtgcttctggaagatagaaggagacatcatcgtgtgtttcccctccccttgcccctgttaagaaacgtatcaatacccattggatgatcaaggctaccgtatttcttctatttttttttatagtgcctgccaggcactttgttttatgtttccaatagcacttcctgaaataaaccaaagcaacactgctcaaggcccctggggcgatggagaaggccacccacctcactgacagtcccaagaatgaccggctgcgaggtcctagtcaaaagtcaacattatgacctggggactccagcatccttcaagcaagccatttccgaagaaggtgaaaagaagccaggatgattggcacctcctcctcctcctcctcttcttcctcttcccttgcccagccccctcctgtgcgtgtgtttcagacaacacaggagccagcacaggagtggaaaatcctgcagcgcaactcagctcagcccacagaagccttgggaatggcctcagtttgtgcaataagaagattttttttttctttttaaatcttcattatattttctttgattgtctgtgagaaagtacccaggtccgcctggaattactctacagtagaaataactgaacacaaacaaactgatggaaaaaaagagttaactattttatttatttcaatatttaaaaggaaaaaagtgctgacatggcacagtatttttgtttaaagtacctcctacttcaaaagttaagcgcaattttgtgaagacatgaaatcataagagtacttaatgtaaaataaaagactgcatattaactctaaagaaaaatgccccacattttaaataagaaaataaagatcaactctgctctctcaggctttttaaaaagccattcatgtatgtgctttaggtatttttatttctgcgagttggatgtggtaagtgaggagtgctcagtttttttttcctccttcaaaagtctattgaaagtgttggtgatgttaaatgattgtgtgttaagatttgactgaaataacttagccacaaatcagcagtttcccccaccctcattgccccctcaccccaggcaagccccttttatctgaatgtcagaagcagcctgcctcctagttatcatgtctgatgaggtctagctcaggaaggaattccatctattgatggaatatatcccctcaagttcaatagattcgaacacagagagctttgtttaaaataatgcagcaaaaaaaaaaaaaaaaaaaaagcaaaaataaaagcatcagctgaggtgatattagttcagtcacctaacaactcctagaagagatgaggaaagggaaccttctgctgagctggcttctggggcctgagcttccagagctgtccccaagggctaggaaggccgacctgaaggatgagaacctcaaattcagttgctggtgggagccaaggaagacggcgggtgttctaacatggccctttctggctgagctggcggaagtgggcgttttggccgatgggatgtatctcggcgctgtgtctgtggcccagcaaaggtgcagggctgactggctgagccactgggttctacccgcaggctccccactgcactgggctttcacacagccatgctcttgggtttccctcccttgtaagcagagtcataataacacacgaatagtctaaggctgggtattctggtcagcagaggtccttgagtcacagtgttactgaaatggttctgagcctgagaatctctttggcctctgaaagggcagggcaggtgggcaccgacttcctgccagtcctttcaggtttcctgttcaaagccagtcctgttggtggaggggatcaccgagagtgtctgtatcattttgtagcccttttctctgacgttttctggtagaaaatgtcccttgtcaaaatgctaataattatcataataatctgctttccaaccaactcccacaagtgacaacctgtgtagaactgtgataaaggtttgcataatgtagggtttgtaccaagtgtgtgtaagtttctgttaaataaaaagtctgtttccaatgctcctat

SEQ ID NO: 126 - protein, 357 aa, Homo sapiens
MATVIHNPLKALGDQFYKEAIEHCRSYNSRLCAERSVRLPFLDSQTGVAQNNCYIWMEKRHRGPGLAPGQLYTYPARCWRKKRRLHPPEDPKLRLLEIKPEVELPLKKDGFTSESTTLEALLRGEGVEKKVDAREEESIQEIQRVLENDENVEEGNEEEDLEEDIPKRKNRTRGRARGSAGGRRRHDAASQEDHDKPYVCDICGKRYKNRPGLSYHYAHTHLASEEGDEAQDQETRSPPNHRNENHRPQKGPDGTVIPNNYCDFCLGGSNMNKKSGRPEELVSCADCGRSAHLGGEGRKEKEAAAAARTTEDLFGSTSESDTSTFHGFDEDDLEEPRSCRGRRSGRGSPTADKKGSC

SEQ ID NO: 127 - DNA, 1166 bp, Homo sapiens
agacaatattctgttacattgtagcaaaatggcgactgtcattcacaaccccctgaaagcgctcggggaccagttctacaaggaagccattgagcactgccggagttacaactcacggctgtgtgcagagcgcagcgtgcgtcttcccttcctggactcacagactggggtggcccagaacaactgctacatctggatggagaagaggcaccgaggcccaggccttgccccgggccagctgtatacataccctgcccgctgctggcgcaagaagagacgattgcacccacctgaagatccaaaactgcggctgctggagataaaacctgaagtggagcttcccctgaagaaggatgggttcacctcagagagcaccacgctggaagccttgctccgtggcgagggggttgagaagaaggtggatgccagggaggaggaaagcatccaggaaatacagagggttttggaaaatgatgaaaatgtagaagaagggaatgaagaagaggatttggaagaggatattcccaagcgaaagaacaggactagaggacgggctcgcggctctgcagggggcaggaggaggcacgacgccgcctctcaggaagaccacgacaaaccttacgtctgtgacatctgtggcaagcgctacaagaaccgaccggggctcagctaccactatgctcacactcacctggccagcgaggagggggatgaagctcaagaccaggagactcggtccccacccaaccacagaaatgagaaccacaggccccagaaaggaccggatggaacagtcattcccaataactactgtgacttctgcttggggggctccaacatgaacaagaagagtgggcggcctgaagagctggtgtcctgcgcagactgtggacgctctggtcacccaacctgcctgcagtttaccctgaacatgaccgaggctgtcaagacctacaagtggcagtgcatagagtgcaaatcctgtatcctctgtgggacctcagagaatgatgaccagctactcttctgcgatgactgtgaccgaggctatcacatgtactgtttaaatcccccggtggctgagcccccagaaggaagctggagctgccacttatgctgggaactgctcaaagagaaagcctcagcctttggctgccaggcctagg

SEQ ID NO: 128 - protein, 378 aa, Homo sapiens
MATVIHNPLKALGDQFYKEAIEHCRSYNSRLCAERSVRLPFLDSQTGVAQNNCYIWMEKRHRGPGLAPGQLYTYPARCWRKKRRLHPPEDPKLRLLEIKPEVELPLKKDGFTSESTTLEALLRGEGVEKKVDAREEESIQEIQRVLENDENVEEGNEEEDLEEDIPKRKNRTRGRARGSAGGRRRHDAASQEDHDKPYVCDICGKRYKNRPGLSYHYAHTHLASEEGDEAQDQETRSPPNHRNENHRPQKGPDGTVIPNNYCDFCLGGSNMNKKSGRPEELVSCADCGRSGHPTCLQFTLNMTEAVKTYKWQCIECKSCILCGTSENDDQLLFCDDCDRGYHMYCLNPPVAEPPEGSWSCHLCWELLKEKASAFGCQA

SEQ ID NO: 129 - DNA, 4221 bp, Homo sapiens
agacaatattctgttacattgtagcaaaatggcgactgtcattcacaaccccctgaaagcgccctttcaagaatcctatgaaagttgtggatcatctccccggaaaacacgcatatagatgtgaacatctgcctatggttttatggggttcacagacctggaagagcccatctctggatgccctggaggcccatgggctctagggctcggggaccagttctacaaggaagccattgagcactgccggagttacaactcacggctgtgtgcagagcgcagcgtgcgtcttcccttcctggactcacagactggggtggcccagaacaactgctacatctggatggagaagaggcaccgaggcccaggccttgccccgggccagctgtatacataccctgcccgctgctggcgcaagaagagacgattgcacccacctgaagatccaaaactgcggctgctggagataaaacctgaagtggagcttcccctgaagaaggatgggttcacctcagagagcaccacgctggaagccttgctccgtggcgagggggttgagaagaaggtggatgccagggaggaggaaagcatccaggaaatacagagggttttggaaaatgatgaaaatgtagaagaagggaatgaagaagaggatttggaagaggatattcccaagcgaaagaacaggactagaggacgggctcgcggctctgcagggggcaggaggaggcacgacgccgcctctcaggaagaccacgacaaaccttacgtctgtgacatctgtggcaagcgctacaagaaccgaccggggctcagctaccactatgctcacactcacctggccagcgaggagggggatgaagctcaagaccaggagactcggtccccacccaaccacagaaatgagaaccacaggccccagaaaggaccggatggaacagtcattcccaataactactgtgacttctgcttggggggctccaacatgaacaagaagagtgggcggcctgaagagctggtgtcctgcgcagactgtggacgctctgctcatttgggaggagaaggcaggaaggagaaggaggcagcggccgcagcacgtaccacggaggacttattcggttccacgtcagaaagtgacacgtcaactttccacggctttgatgaggacgatttggaagagcctcgctcctgtcgaggacgccgcagtggccggggttcgcccacagcagataaaaagggcagttgctaaacccacggaacagactctctgggcaattagccatccccctctgactttggtcattgtgctggttctgatatatattttttttaatgaaaggcaactttagattttccctctatccttgctttttttcccttcacctcccacgtgtccctccatccctccccccacccctctgttttgggtatgtacaacagaagcacaaactactgaaacaaaacaaaacagcagaatgagcgttcttccgagagatggcatcgtgatgcgctatttattttccatagaaataggaagttagacggattgtctcttttctgaggggagggggtctttttgacaggagcagagttgatgtcctcaattttcatatttattggcaaaaggaagagaagaggaactttgggttggaaacaaagaaccaataacattaaaacattattatttatatattctagctgttattagaatcagactttttttgcgagagagagagagagagagagagaagggaaatcaaagaaatcgaagcaatatcctgtttagaggcaagccgcccggtggggagaatttcctcaatgggagacggttgcactattctgtgccccacggagtttgcggctccccgcggcagacccctccctcattctcctccctgacctttccatcttcctctctgcttgcgagaaaatgtcagtagttccagagaagtcggggtgcctatgcctggcctccctccacacctgggccctgaccagccgcctcctgggctcctcctcctccgtcagtagagctgctgttttgttattgctggtttttcctcactttcctcctggcaaagaacgacttccaaatgcagggatggaatataagcagaacgtcatgggctcagcagtgactccaccacccgaggccgaggccgtgcttctggaagatagaaggagacatcatcgtgtgtttcccctccccttgcccctgttaagaaacgtatcaatacccattggatgatcaaggctaccgtatttcttctatttttttttatagtgcctgccaggcactttgttttatgtttccaatagcacttcctgaaataaaccaaagcaacactgctcaaggcccctggggcgatggagaaggccacccacctcactgacagtcccaagaatgaccggctgcgaggtcctagtcaaaagtcaacattatgacctggggactccagcatccttcaagcaagccatttccgaagaaggtgaaaagaagccaggatgattggcacctcctcctcctcctcctcttcttcctcttcccttgcccagccccctcctgtgcgtgtgtttcagacaacacaggagccagcacaggagtggaaaatcctgcagcgcaactcagctcagcccacagaagccttgggaatggcctcagtttgtgcaataagaagattttttttttctttttaaatcttcattatattttctttgattgtctgtgagaaagtacccaggtccgcctggaattactctacagtagaaataactgaacacaaacaaactgatggaaaaaaagagttaactattttatttatttcaatatttaaaaggaaaaaagtgctgacatggcacagtatttttgtttaaagtacctcctacttcaaaagttaagcgcaattttgtgaagacatgaaatcataagagtacttaatgtaaaataaaagactgcatattaactctaaagaaaaatgccccacattttaaataagaaaataaagatcaactctgctctctcaggctttttaaaaagccattcatgtatgtgctttaggtatttttatttctgcgagttggatgtggtaagtgaggagtgctcagtttttttttcctccttcaaaagtctattgaaagtgttggtgatgttaaatgattgtgtgttaagatttgactgaaataacttagccacaaatcagcagtttcccccaccctcattgccccctcaccccaggcaagccccttttatctgaatgtcagaagcagcctgcctcctagttatcatgtctgatgaggtctagctcaggaaggaattccatctattgatggaatatatcccctcaagttcaatagattcgaacacagagagctttgtttaaaataatgcagcaaaaaaaaaaaaaaaaaaaaagcaaaaataaaagcatcagctgaggtgatattagttcagtcacctaacaactcctagaagagatgaggaaagggaaccttctgctgagctggcttctggggcctgagcttccagagctgtccccaagggctaggaaggccgacctgaaggatgagaacctcaaattcagttgctggtgggagccaaggaagacggcgggtgttctaacatggccctttctggctgagctggcggaagtgggcgttttggccgatgggatgtatctcggcgctgtgtctgtggcccagcaaaggtgcagggctgactggctgagccactgggttctacccgcaggctccccactgcactgggctttcacacagccatgctcttgggtttccctcccttgtaagcagagtcataataacacacgaatagtctaaggctgggtattctggtcagcagaggtccttgagtcacagtgttactgaaatggttctgagcctgagaatctctttggcctctgaaagggcagggcaggtgggcaccgacttcctgccagtcctttcaggtttcctgttcaaagccagtcctgttggtggaggggatcaccgagagtgtctgtatcattttgtagcccttttctctgacgttttctggtagaaaatgtcccttgtcaaaatgctaataattatcataataatctgctttccaaccaactcccacaagtgacaacctgtgtagaactgtgataaaggtttgcataatgtagggtttgtaccaagtgtgtgtaagtttctgttaaataaaaagtctgtttccaatgctcctat

SEQ ID NO: 130 - protein, 367 aa, Homo sapiens
MGFTDLEEPISGCPGGPWALGLGDQFYKEAIEHCRSYNSRLCAERSVRLPFLDSQTGVAQNNCYIWMEKRHRGPGLAPGQLYTYPARCWRKKRRLHPPEDPKLRLLEIKPEVELPLKKDGFTSESTTLEALLRGEGVEKKVDAREEESIQEIQRVLENDENVEEGNEEEDLEEDIPKRKNRTRGRARGSAGGRRRHDAASQEDHDKPYVCDICGKRYKNRPGLSYHYAHTHLASEEGDEAQDQETRSPPNHRNENHRPQKGPDGTVIPNNYCDFCLGGSNMNKKSGRPEELVSCADCGRSAHLGGEGRKEKEAAAAARTTEDLFGSTSESDTSTFHGFDEDDLEEPRSCRGRRSGRGSPTADKKGSC

SEQ ID NO: 131 - DNA, 4520 bp, Homo sapiens
attctcgtcttcacccctggccactcctggagttgaaaaccaggttcgctcccggggacggtagggggttcctaacgcaaaggaatgcacagggagaatcggacgtgtttgcgccagctcgtcgcccatcagaaatagggaaaggggtaggaaggccccaggtttcaaatatatttatatgaaagctgccgttaagaggacgttggaagctgaggctgatcagataggagctcctggcttcagttctggctcggaagctcggatacactgcgcttgaacgccacagcgtttcacccaagaaagaaaatgttttatggcagaataaatgggcgtaacttcgccgcatcctcgctgccggttgctttcgctgcaacaccgctgatgctgtttctaccgaacccacaactgattttcagtttccccatttccagccgaaatcacataaccgggctgatgccacctggtaaactcaagttagagaacctatttcacatgtgcaccaggctcggggaccagttctacaaggaagccattgagcactgccggagttacaactcacggctgtgtgcagagcgcagcgtgcgtcttcccttcctggactcacagactggggtggcccagaacaactgctacatctggatggagaagaggcaccgaggcccaggccttgccccgggccagctgtatacataccctgcccgctgctggcgcaagaagagacgattgcacccacctgaagatccaaaactgcggctgctggagataaaacctgaagtggagcttcccctgaagaaggatgggttcacctcagagagcaccacgctggaagccttgctccgtggcgagggggttgagaagaaggtggatgccagggaggaggaaagcatccaggaaatacagagggttttggaaaatgatgaaaatgtagaagaagggaatgaagaagaggatttggaagaggatattcccaagcgaaagaacaggactagaggacgggctcgcggctctgcagggggcaggaggaggcacgacgccgcctctcaggaagaccacgacaaaccttacgtctgtgacatctgtggcaagcgctacaagaaccgaccggggctcagctaccactatgctcacactcacctggccagcgaggagggggatgaagctcaagaccaggagactcggtccccacccaaccacagaaatgagaaccacaggccccagaaaggaccggatggaacagtcattcccaataactactgtgacttctgcttggggggctccaacatgaacaagaagagtgggcggcctgaagagctggtgtcctgcgcagactgtggacgctctgctcatttgggaggagaaggcaggaaggagaaggaggcagcggccgcagcacgtaccacggaggacttattcggttccacgtcagaaagtgacacgtcaactttccacggctttgatgaggacgatttggaagagcctcgctcctgtcgaggacgccgcagtggccggggttcgcccacagcagataaaaagggcagttgctaaacccacggaacagactctctgggcaattagccatccccctctgactttggtcattgtgctggttctgatatatattttttttaatgaaaggcaactttagattttccctctatccttgctttttttcccttcacctcccacgtgtccctccatccctccccccacccctctgttttgggtatgtacaacagaagcacaaactactgaaacaaaacaaaacagcagaatgagcgttcttccgagagatggcatcgtgatgcgctatttattttccatagaaataggaagttagacggattgtctcttttctgaggggagggggtctttttgacaggagcagagttgatgtcctcaattttcatatttattggcaaaaggaagagaagaggaactttgggttggaaacaaagaaccaataacattaaaacattattatttatatattctagctgttattagaatcagactttttttgcgagagagagagagagagagagagaagggaaatcaaagaaatcgaagcaatatcctgtttagaggcaagccgcccggtggggagaatttcctcaatgggagacggttgcactattctgtgccccacggagtttgcggctccccgcggcagacccctccctcattctcctccctgacctttccatcttcctctctgcttgcgagaaaatgtcagtagttccagagaagtcggggtgcctatgcctggcctccctccacacctgggccctgaccagccgcctcctgggctcctcctcctccgtcagtagagctgctgttttgttattgctggtttttcctcactttcctcctggcaaagaacgacttccaaatgcagggatggaatataagcagaacgtcatgggctcagcagtgactccaccacccgaggccgaggccgtgcttctggaagatagaaggagacatcatcgtgtgtttcccctccccttgcccctgttaagaaacgtatcaatacccattggatgatcaaggctaccgtatttcttctatttttttttatagtgcctgccaggcactttgttttatgtttccaatagcacttcctgaaataaaccaaagcaacactgctcaaggcccctggggcgatggagaaggccacccacctcactgacagtcccaagaatgaccggctgcgaggtcctagtcaaaagtcaacattatgacctggggactccagcatccttcaagcaagccatttccgaagaaggtgaaaagaagccaggatgattggcacctcctcctcctcctcctcttcttcctcttcccttgcccagccccctcctgtgcgtgtgtttcagacaacacaggagccagcacaggagtggaaaatcctgcagcgcaactcagctcagcccacagaagccttgggaatggcctcagtttgtgcaataagaagattttttttttctttttaaatcttcattatattttctttgattgtctgtgagaaagtacccaggtccgcctggaattactctacagtagaaataactgaacacaaacaaactgatggaaaaaaagagttaactattttatttatttcaatatttaaaaggaaaaaagtgctgacatggcacagtatttttgtttaaagtacctcctacttcaaaagttaagcgcaattttgtgaagacatgaaatcataagagtacttaatgtaaaataaaagactgcatattaactctaaagaaaaatgccccacattttaaataagaaaataaagatcaactctgctctctcaggctttttaaaaagccattcatgtatgtgctttaggtatttttatttctgcgagttggatgtggtaagtgaggagtgctcagtttttttttcctccttcaaaagtctattgaaagtgttggtgatgttaaatgattgtgtgttaagatttgactgaaataacttagccacaaatcagcagtttcccccaccctcattgccccctcaccccaggcaagccccttttatctgaatgtcagaagcagcctgcctcctagttatcatgtctgatgaggtctagctcaggaaggaattccatctattgatggaatatatcccctcaagttcaatagattcgaacacagagagctttgtttaaaataatgcagcaaaaaaaaaaaaaaaaaaaaagcaaaaataaaagcatcagctgaggtgatattagttcagtcacctaacaactcctagaagagatgaggaaagggaaccttctgctgagctggcttctggggcctgagcttccagagctgtccccaagggctaggaaggccgacctgaaggatgagaacctcaaattcagttgctggtgggagccaaggaagacggcgggtgttctaacatggccctttctggctgagctggcggaagtgggcgttttggccgatgggatgtatctcggcgctgtgtctgtggcccagcaaaggtgcagggctgactggctgagccactgggttctacccgcaggctccccactgcactgggctttcacacagccatgctcttgggtttccctcccttgtaagcagagtcataataacacacgaatagtctaaggctgggtattctggtcagcagaggtccttgagtcacagtgttactgaaatggttctgagcctgagaatctctttggcctctgaaagggcagggcaggtgggcaccgacttcctgccagtcctttcaggtttcctgttcaaagccagtcctgttggtggaggggatcaccgagagtgtctgtatcattttgtagcccttttctctgacgttttctggtagaaaatgtcccttgtcaaaatgctaataattatcataataatctgctttccaaccaactcccacaagtgacaacctgtgtagaactgtgataaaggtttgcataatgtagggtttgtaccaagtgtgtgtaagtttctgttaaataaaaagtctgtttccaatgctcctat

SEQ ID NO: 132 - protein, 412 aa, Homo sapiens
MFYGRINGRNFAASSLPVAFAATPLMLFLPNPQLIFSFPISSRNHITGLMPPGKLKLENLFHMCTRLGDQFYKEAIEHCRSYNSRLCAERSVRLPFLDSQTGVAQNNCYIWMEKRHRGPGLAPGQLYTYPARCWRKKRRLHPPEDPKLRLLEIKPEVELPLKKDGFTSESTTLEALLRGEGVEKKVDAREEESIQEIQRVLENDENVEEGNEEEDLEEDIPKRKNRTRGRARGSAGGRRRHDAASQEDHDKPYVCDICGKRYKNRPGLSYHYAHTHLASEEGDEAQDQETRSPPNHRNENHRPQKGPDGTVIPNNYCDFCLGGSNMNKKSGRPEELVSCADCGRSAHLGGEGRKEKEAAAAARTTEDLFGSTSESDTSTFHGFDEDDLEEPRSCRGRRSGRGSPTADKKGSC

SEQ ID NO: 133 - DNA, 3155 bp, Mus musculus
agacaatattctgttacattgtagcaaaatggcgactgtcattcacaaccccctgaaagcgcttggggaccagttctacaaggaagccattgagcactgccggagctacaactcgaggctgtgcgcagagcggagcgtgcgtctccccttcctggactcgcagactggggtggctcagaacaactgctacatctggatggagaagaggcaccgcggcccaggcctcgctccgggccagttgtacacataccctgcccgctgctggcgcaagaagcgacgattgcacccaccagaggacccaaaactacgactcctggaaatcaaacccgaagtagaactgcccctgaagaaagatggatttacctctgagagtaccacactggaagccttgcttcgcggcgagggagtagagaagaaggtggatgccagagaagaggaaagcatccaggagatacagagggttttggaaaatgatgaaaacgtagaagaagggaatgaagaggaggatttggaagaagatgttcccaagcgcaagaacaggaccagaggacgggctcgcggctctgcaggcggaaggaggaggcatgatgccgcctctcaggaagaccacgacaaaccctacgtctgcgacatctgtggcaagcgctacaagaaccggccaggactcagctaccactacgctcatactcacctggccagcgaggagggagacgaagcccaagaccaggagacccgatccccacccaaccacagaaatgagaaccacagaccccagaaaggaccagacgggacagtcattcctaataactactgtgacttctgcttggggggctccaacatgaacaagaagagtgggaggcctgaagagctggtgtcctgtgcagactgtggacgctctggtcatccaacttgcctgcagttcactctgaacatgactgaggcagttaagacctacaagtggcagtgcatagagtgtaaatcctgtatcctgtgtgggacctcggagaacgacgaccagctactcttctgtgatgactgcgatcgtggctatcacatgtactgtttaaatcccccagtggctgagcccccagaaggaagctggagctgccatttatgctgggagctgctcaaagagaaagcatcagcctttggctgccaggcctagggctccacccaggtcacagagtgcagcccaccactagagaggctgaactgaagccctgttcaacccagatggaggtctcctcctgtatatgcacacagaccaactacaaggaaaacgaatagttacagaagggaacggagggagcaaggtctccactcacttctcgccctacccatgacctcccaccccacacatccttcagccagctcttcctcatttctaccagcgggaacttggcacttttgaagaataatccagccccggctctgtggaaacttcctcatgttcactgtcacaggcatctctctttgttgcttcttgttttggaggaagccattttgtgactgctcatcaaccactcgtgtgttgcttggtggggttcttgttttgttgtctattgtgtttcaagaacttgtcacagagtgtcctcacccttagcttaggctcttcatcctgaaactcacagaggaacaaaatgccgtggtggggaagctcctgcctattacgagtctcactggaagcatccatgtttggaggccatcttgaagacagaacttggaaaatgtcttggttttcttagtctctgctgagaagagaagttgtagcatttgagccttggcagtagcatccccagctgcgatgaccttgatccactgcactgccatttgatcaggggttcagagggcctgggagatgggaggaacacttggggccctgctatagccagccagtatttgctgttcctcaggagggactaggtggttccttgaccttcagaactgtggtgtccttgaggtgagacaacacagtctctaaacacagaaaagtgctgaagatcctgcccccaaccgaattgaccgtgaaggtctggctcagtctctggggggtgggactcaagctctggagaggtgggcaaaggatgcccattcaacagtccagggttggttagaagagactgtatgtagctttgagaaactctcccagtattgatgctacactatggatttcttttctgggcaatttcttccttccatgtagtatatgtttgccaatgaccactgagatgtgactggaaattttagaatggtgaagagatgaacattacttaaccagatcattgggcacagtgattacttgtgactgggtggcaatgattcagagcccttgtccgttcttgcaccctaagctcccccatatggaatgggctctcgtttgaagcaaggtttctagaagatgtaggaaggtctagattctgagaactcttgtgtgtcagaagagaagccttgagggctggagtgggctgggctgcctttgacgcacggcaccagcatgataactgacacatttctggaaaaatcgtttgcccaaagggcaggtctccgtgagcaggaccctcgcgcatgctcggcttccctggattcagctccatcgctgtggtccagcagcttgcaacaaaggcctgggttatttttagtcgtcagctcctgaagaagcccctggagacctgggctggctgggcccctctgcccagcggcagcatggcctctgccactccacaggagtcatcctccccctggctaattgctcttggcacgtggacccagggcagcctggcatggaaccaagcagtgtgaccccccctgcaacttctttgcagagtgacctgtggcaagagagtgggggtcactttcctgcaggccctgtggcctcagagctagttccatgcatacgaaatgatctcatttaaagggcccctgtccagagagcatctgtctcctcctctcaagctctcttcttcctcctgctggttgctgtgcctgtgtggattcaaaagacccaagggagggctggaggaatggcccgtctccacggaggggtacattccctctccagactctgcgggctctctcgttccacaaaacccaaagcagagtatcttcagagactaactacttgtttgggggatcatattaaattaatttcagaaggg

SEQ ID NO: 134 - protein, 378 aa, Mus musculus
MATVIHNPLKALGDQFYKEAIEHCRSYNSRLCAERSVRLPFLDSQTGVAQNNCYIWMEKRHRGPGLAPGQLYTYPARCWRKKRRLHPPEDPKLRLLEIKPEVELPLKKDGFTSESTTLEALLRGEGVEKKVDAREEESIQEIQRVLENDENVEEGNEEEDLEEDVPKRKNRTRGRARGSAGGRRRHDAASQEDHDKPYVCDICGKRYKNRPGLSYHYAHTHLASEEGDEAQDQETRSPPNHRNENHRPQKGPDGTVIPNNYCDFCLGGSNMNKKSGRPEELVSCADCGRSGHPTCLQFTLNMTEAVKTYKWQCIECKSCILCGTSENDDQLLFCDDCDRGYHMYCLNPPVAEPPEGSWSCHLCWELLKEKASAFGCQA

SEQ ID NO: 135 - DNA, 1532 bp, Mus musculus
agacaatattctgttacattgtagcaaaatggcgactgtcattcacaaccccctgaaagcgcttggggaccagttctacaaggaagccattgagcactgccggagctacaactcgaggctgtgcgcagagcggagcgtgcgtctccccttcctggactcgcagactggggtggctcagaacaactgctacatctggatggagaagaggcaccgcggcccaggcctcgctccgggccagttgtacacataccctgcccgctgctggcgcaagaagcgacgattgcacccaccagaggacccaaaactacgactcctggaaatcaaacccgaagtagaactgcccctgaagaaagatggatttacctctgagagtaccacactggaagccttgcttcgcggcgagggagtagagaagaaggtggatgccagagaagaggaaagcatccaggagatacagagggttttggaaaatgatgaaaacgtagaagaagggaatgaagaggaggatttggaagaagatgttcccaagcgcaagaacaggaccagaggacgggctcgcggctctgcaggcggaaggaggaggcatgatgccgcctctcaggaagaccacgacaaaccctacgtctgcgacatctgtggcaagcgctacaagaaccggccaggactcagctaccactacgctcatactcacctggccagcgaggagggagacgaagcccaagaccaggagacccgatccccacccaaccacagaaatgagaaccacagaccccagaaaggaccagacgggacagtcattcctaataactactgtgacttctgcttggggggctccaacatgaacaagaagagtgggaggcctgaagagctggtgtcctgtgcagactgtggacgctctgctcatttgggaggagaaggcaggaaggagaaggaggcagcggccgcagcacgtaccacggaggacttattcggttccacgtcagaaagtgacacctcaactttctacggctttgatgaggacgatttggaagagcctcgctcctgtcgaggacgccgcagtggccggggttcacccacagcagataaaaagggcagctgctgagcacatgggacagactgtgtggccaattagccacccctccccctgactctggtcattgttctagttctgatatatatttttaaatgaaagacaacttgggcatttcccttaatccttgccttttccttctgcctcccacgtgtccctccctctcctagcttccttctattttgggtacaacagaagcacacactactgagaaccagggaagagcaggatgagagtcctctggggagccatggcatcatggcgggctcttatggactcttatccctagaagtaggagaaattaagaggattttctgtcactgggggagggcatctttttgatgtgagcagagttgatttcctgttttcaagagaagaggaacatgaggtttgaaaacaaataacattaacaatatttatttataaaaaaaaaaaaaaaaaa

SEQ ID NO: 136 - protein, 357 aa, Mus musculus
MATVIHNPLKALGDQFYKEAIEHCRSYNSRLCAERSVRLPFLDSQTGVAQNNCYIWMEKRHRGPGLAPGQLYTYPARCWRKKRRLHPPEDPKLRLLEIKPEVELPLKKDGFTSESTTLEALLRGEGVEKKVDAREEESIQEIQRVLENDENVEEGNEEEDLEEDVPKRKNRTRGRARGSAGGRRRHDAASQEDHDKPYVCDICGKRYKNRPGLSYHYAHTHLASEEGDEAQDQETRSPPNHRNENHRPQKGPDGTVIPNNYCDFCLGGSNMNKKSGRPEELVSCADCGRSAHLGGEGRKEKEAAAAARTTEDLFGSTSESDTSTFYGFDEDDLEEPRSCRGRRSGRGSPTADKKGSC

SEQ ID NO: 137 - DNA, 1529 bp, Mus musculus
agacaatattctgttacattgtagcaaaatggcgactgtcattcacaaccccctgaaagcgcttggggaccagttctacaaggaagccattgagcactgccggagctacaactcgaggctgtgcgcagagcggagcgtgcgtctccccttcctggactcgcagactggggtggctcagaacaactgctacatctggatggagaagaggcaccgcggcccaggcctcgctccgggccagttgtacacataccctgcccgctgctggcgcaagaagcgacgattgcacccaccagaggacccaaaactacgactcctggaaatcaaacccgtagaactgcccctgaagaaagatggatttacctctgagagtaccacactggaagccttgcttcgcggcgagggagtagagaagaaggtggatgccagagaagaggaaagcatccaggagatacagagggttttggaaaatgatgaaaacgtagaagaagggaatgaagaggaggatttggaagaagatgttcccaagcgcaagaacaggaccagaggacgggctcgcggctctgcaggcggaaggaggaggcatgatgccgcctctcaggaagaccacgacaaaccctacgtctgcgacatctgtggcaagcgctacaagaaccggccaggactcagctaccactacgctcatactcacctggccagcgaggagggagacgaagcccaagaccaggagacccgatccccacccaaccacagaaatgagaaccacagaccccagaaaggaccagacgggacagtcattcctaataactactgtgacttctgcttggggggctccaacatgaacaagaagagtgggaggcctgaagagctggtgtcctgtgcagactgtggacgctctgctcatttgggaggagaaggcaggaaggagaaggaggcagcggccgcagcacgtaccacggaggacttattcggttccacgtcagaaagtgacacctcaactttctacggctttgatgaggacgatttggaagagcctcgctcctgtcgaggacgccgcagtggccggggttcacccacagcagataaaaagggcagctgctgagcacatgggacagactgtgtggccaattagccacccctccccctgactctggtcattgttctagttctgatatatatttttaaatgaaagacaacttgggcatttcccttaatccttgccttttccttctgcctcccacgtgtccctccctctcctagcttccttctattttgggtacaacagaagcacacactactgagaaccagggaagagcaggatgagagtcctctggggagccatggcatcatggcgggctcttatggactcttatccctagaagtaggagaaattaagaggattttctgtcactgggggagggcatctttttgatgtgagcagagttgatttcctgttttcaagagaagaggaacatgaggtttgaaaacaaataacattaacaatatttatttataaaaaaaaaaaaaaaaaa

SEQ ID NO: 138 - protein, 356 aa, Mus musculus
MATVIHNPLKALGDQFYKEAIEHCRSYNSRLCAERSVRLPFLDSQTGVAQNNCYIWMEKRHRGPGLAPGQLYTYPARCWRKKRRLHPPEDPKLRLLEIKPVELPLKKDGFTSESTTLEALLRGEGVEKKVDAREEESIQEIQRVLENDENVEEGNEEEDLEEDVPKRKNRTRGRARGSAGGRRRHDAASQEDHDKPYVCDICGKRYKNRPGLSYHYAHTHLASEEGDEAQDQETRSPPNHRNENHRPQKGPDGTVIPNNYCDFCLGGSNMNKKSGRPEELVSCADCGRSAHLGGEGRKEKEAAAAARTTEDLFGSTSESDTSTFYGFDEDDLEEPRSCRGRRSGRGSPTADKKGSC

SEQ ID NO: 139 - DNA, 1932 bp, Homo sapiens
agacttaggcctggaccctagtgattggctgataggaggagccagcaagtgtggctgagctccggggtgtgtggacgccgctttgttgcctgaggtgggtggcggtggaagttaagggagtcaggggctatcgctcctcgagactcgcagtcgcggccactgcagtcacttcgccagttagcccttagggtaggagtcgcgccggcagcagccatgagcggcggcgtgtacgggggagatgaagttggagcccttgtttttgacattggatcctatactgtgagagctggttatgctggtgaggactgccccaaggtggattttcctacagctattggtatggtggtagaaagagatgacggaagcacattaatggaaatagatggcgataaaggcaaacaaggcggtcccacctactacatagatactaatgctctgcgtgttccgagggagaatatggaggccatttcacctctaaaaaatgggatggttgaagactgggatagtttccaagctattttggatcatacctacaaaatgcatgtcaaatcagaagccagtctccatcctgttctcatgtcagaggcaccgtggaatactagagcaaagagagagaaactgacagagttaatgtttgaacactacaacatccctgccttcttcctttgcaaaactgcagttttgacagcatttgctaatggtcgttctactgggctgattttggacagtggagccactcataccactgcaattccagtccacgatggctatgtccttcaacaaggcattgtgaaatcccctcttgctggagactttattactatgcagtgcagagaactcttccaagaaatgaatattgaattggttcctccatatatgattgcatcaaaagaagctgttcgtgaaggatctccagcaaactggaaaagaaaagagaagttgcctcaggttacgaggtcttggcacaattatatgtgtaattgtgttatccaggattttcaagcttcggtacttcaagtgtcagattcaacttatgatgaacaagtggctgcacagatgccaactgttcattatgaattccccaatggctacaattgtgattttggtgcagagcggctaaagattccagaaggattatttgacccttccaatgtaaaggggttatcaggaaacacaatgttaggagtcagtcatgttgtcaccacaagtgttgggatgtgtgatattgacatcagaccaggtctctatggcagtgtaatagtggcaggaggaaacacactaatacagagttttactgacaggttgaatagagagctgtctcagaaaactcctccaagtatgcggttgaaattgattgcaaataatacaacagtggaacggaggtttagctcatggattggcggctccattctagcctctttgggtacctttcaacagatgtggatttccaagcaagaatatgaagaaggagggaagcagtgtgtagaaagaaaatgcccttgagaaagagttcccaagcttctaccttccttttgtcaccttacgtttcatagctttagtatactcaggaaaagaatgaccatcttttgtagaatgtttatacatttttgcatatttcaatttccacttaaattttttaaagctttaactggctctataaattaagtttgtgctttccttgaaatgcacttattcttattacaagcattttataattttgtataaatgtctattttctctaaatattttgctttcagtaaaatgctttccaactctgtttagtgtattaattaccagtggattggtagaactgctttttattgactagtaaaagttactgcctatgctttttaccttaggcttacagaattaaataaaaattagccattccagaaataaaaaaaaaaaaaaaaaaaaaaaaaaaaaaaaaaa

SEQ ID NO: 140 - protein, 429 aa, Homo sapiens
MSGGVYGGDEVGALVFDIGSYTVRAGYAGEDCPKVDFPTAIGMVVERDDGSTLMEIDGDKGKQGGPTYYIDTNALRVPRENMEAISPLKNGMVEDWDSFQAILDHTYKMHVKSEASLHPVLMSEAPWNTRAKREKLTELMFEHYNIPAFFLCKTAVLTAFANGRSTGLILDSGATHTTAIPVHDGYVLQQGIVKSPLAGDFITMQCRELFQEMNIELVPPYMIASKEAVREGSPANWKRKEKLPQVTRSWHNYMCNCVIQDFQASVLQVSDSTYDEQVAAQMPTVHYEFPNGYNCDFGAERLKIPEGLFDPSNVKGLSGNTMLGVSHVVTTSVGMCDIDIRPGLYGSVIVAGGNTLIQSFTDRLNRELSQKTPPSMRLKLIANNTTVERRFSSWIGGSILASLGTFQQMWISKQEYEEGGKQCVERKCP

SEQ ID NO: 141 - DNA, 1788 bp, Homo sapiens
agacttaggcctggaccctagtgattggctgataggaggagccagcaagtgtggctgagctccggggtgtgtggacgccgctttgttgcctgagatgaagttggagcccttgtttttgacattggatcctatactgtgagagctggttatgctggtgaggactgccccaaggtggattttcctacagctattggtatggtggtagaaagagatgacggaagcacattaatggaaatagatggcgataaaggcaaacaaggcggtcccacctactacatagatactaatgctctgcgtgttccgagggagaatatggaggccatttcacctctaaaaaatgggatggttgaagactgggatagtttccaagctattttggatcatacctacaaaatgcatgtcaaatcagaagccagtctccatcctgttctcatgtcagaggcaccgtggaatactagagcaaagagagagaaactgacagagttaatgtttgaacactacaacatccctgccttcttcctttgcaaaactgcagttttgacagcatttgctaatggtcgttctactgggctgattttggacagtggagccactcataccactgcaattccagtccacgatggctatgtccttcaacaaggcattgtgaaatcccctcttgctggagactttattactatgcagtgcagagaactcttccaagaaatgaatattgaattggttcctccatatatgattgcatcaaaagaagctgttcgtgaaggatctccagcaaactggaaaagaaaagagaagttgcctcaggttacgaggtcttggcacaattatatgtgtaattgtgttatccaggattttcaagcttcggtacttcaagtgtcagattcaacttatgatgaacaagtggctgcacagatgccaactgttcattatgaattccccaatggctacaattgtgattttggtgcagagcggctaaagattccagaaggattatttgacccttccaatgtaaaggggttatcaggaaacacaatgttaggagtcagtcatgttgtcaccacaagtgttgggatgtgtgatattgacatcagaccaggtctctatggcagtgtaatagtggcaggaggaaacacactaatacagagttttactgacaggttgaatagagagctgtctcagaaaactcctccaagtatgcggttgaaattgattgcaaataatacaacagtggaacggaggtttagctcatggattggcggctccattctagcctctttgggtacctttcaacagatgtggatttccaagcaagaatatgaagaaggagggaagcagtgtgtagaaagaaaatgcccttgagaaagagttcccaagcttctaccttccttttgtcaccttacgtttcatagctttagtatactcaggaaaagaatgaccatcttttgtagaatgtttatacatttttgcatatttcaatttccacttaaattttttaaagctttaactggctctataaattaagtttgtgctttccttgaaatgcacttattcttattacaagcattttataattttgtataaatgtctattttctctaaatattttgctttcagtaaaatgctttccaactctgtttagtgtattaattaccagtggattggtagaactgctttttattgactagtaaaagttactgcctatgctttttaccttaggcttacagaattaaataaaaattagccattccagaaataaaaaaaaaaaaaaaaaaaaaaaaaaaaaaaaaaa

SEQ ID NO: 142 - DNA, 1980 bp, Homo sapiens
agacttaggcctggaccctagtgattggctgataggaggagccagcaagtgtggctgagctccggggtgtgtggacgccgctttgttgcctgaggtgggtggcggtggaagttaagggagtcaggggctatcgctcctcgagactcgcagtcgcggccactgcagtcacttcgccagttagcccttagggtaggagtcgcgccggcagcagccatgagcggcggcgtgtacgggggaggtgagtgagtgcggccggacgagagagcgcgccttttcggcgtgtgggatgaagttggagcccttgtttttgacattggatcctatactgtgagagctggttatgctggtgaggactgccccaaggtggattttcctacagctattggtatggtggtagaaagagatgacggaagcacattaatggaaatagatggcgataaaggcaaacaaggcggtcccacctactacatagatactaatgctctgcgtgttccgagggagaatatggaggccatttcacctctaaaaaatgggatggttgaagactgggatagtttccaagctattttggatcatacctacaaaatgcatgtcaaatcagaagccagtctccatcctgttctcatgtcagaggcaccgtggaatactagagcaaagagagagaaactgacagagttaatgtttgaacactacaacatccctgccttcttcctttgcaaaactgcagttttgacagcatttgctaatggtcgttctactgggctgattttggacagtggagccactcataccactgcaattccagtccacgatggctatgtccttcaacaaggcattgtgaaatcccctcttgctggagactttattactatgcagtgcagagaactcttccaagaaatgaatattgaattggttcctccatatatgattgcatcaaaagaagctgttcgtgaaggatctccagcaaactggaaaagaaaagagaagttgcctcaggttacgaggtcttggcacaattatatgtgtaattgtgttatccaggattttcaagcttcggtacttcaagtgtcagattcaacttatgatgaacaagtggctgcacagatgccaactgttcattatgaattccccaatggctacaattgtgattttggtgcagagcggctaaagattccagaaggattatttgacccttccaatgtaaaggggttatcaggaaacacaatgttaggagtcagtcatgttgtcaccacaagtgttgggatgtgtgatattgacatcagaccaggtctctatggcagtgtaatagtggcaggaggaaacacactaatacagagttttactgacaggttgaatagagagctgtctcagaaaactcctccaagtatgcggttgaaattgattgcaaataatacaacagtggaacggaggtttagctcatggattggcggctccattctagcctctttgggtacctttcaacagatgtggatttccaagcaagaatatgaagaaggagggaagcagtgtgtagaaagaaaatgcccttgagaaagagttcccaagcttctaccttccttttgtcaccttacgtttcatagctttagtatactcaggaaaagaatgaccatcttttgtagaatgtttatacatttttgcatatttcaatttccacttaaattttttaaagctttaactggctctataaattaagtttgtgctttccttgaaatgcacttattcttattacaagcattttataattttgtataaatgtctattttctctaaatattttgctttcagtaaaatgctttccaactctgtttagtgtattaattaccagtggattggtagaactgctttttattgactagtaaaagttactgcctatgctttttaccttaggcttacagaattaaataaaaattagccattccagaaataaaaaaaaaaaaaaaaaaaaaaaaaaaaaaaaaaa

SEQ ID NO: 143 - protein, 387 aa, Homo sapiens
MVVERDDGSTLMEIDGDKGKQGGPTYYIDTNALRVPRENMEAISPLKNGMVEDWDSFQAILDHTYKMHVKSEASLHPVLMSEAPWNTRAKREKLTELMFEHYNIPAFFLCKTAVLTAFANGRSTGLILDSGATHTTAIPVHDGYVLQQGIVKSPLAGDFITMQCRELFQEMNIELVPPYMIASKEAVREGSPANWKRKEKLPQVTRSWHNYMCNCVIQDFQASVLQVSDSTYDEQVAAQMPTVHYEFPNGYNCDFGAERLKIPEGLFDPSNVKGLSGNTMLGVSHVVTTSVGMCDIDIRPGLYGSVIVAGGNTLIQSFTDRLNRELSQKTPPSMRLKLIANNTTVERRFSSWIGGSILASLGTFQQMWISKQEYEEGGKQCVERKCP

SEQ ID NO: 144 - DNA, 1969 bp, Mus musculus
cttcttctgtcgcttctccctctccctgcccctacggatgccttccattggctaagacggctaaaccgcgcggggatgcagcagcgccacactctgattggctaatgactaagccggaccctttgtcattggttgatacgagaaaccagcaagagtggctgtgcagcgggcgtgcggccgctgctttgttgccggagggggcggcgttggaagttgcaggcttgcggggccggcgttctcagggagaggagtcacgccgctgttatctttcgtccggtagtcttcggccagtccccgccagacagtagccatgagcggcggcgtgtacggcggagatgaagttggcgctcttgtttttgacattggatcgtacacagtgagggctggctatgctggcgaggactgccctaaggttgatttccccacggctatcggtgtggtgctggagagagatgacggaagtacaatgatggagattgatggtgacaaaggcaagcagggcgggcccacctactacatagacaccaatgccctccgcgtgcccagggagaacatggaggccatctcaccactcaagaatggcatggttgaagactgggatagtttccaggccattttggatcatacatacaagatgcatgtcaaatccgaagccagcctgcatcctgttctcatgtcggaagcaccgtggaacaccagggcgaagagagagaaactgacagagttgatgtttgagcactacagcatccctgcattcttcctttgcaaaactgcagttttgacggcatttgctaatggtcgttctactgggctgattttggacagtggagctacccacaccactgcgattccagtccacgatggctatgttcttcaacaaggcattgtgaaatcccctctggctggagacttcattaccatgcagtgcagagaactcttccaggaaatgaacatagaactcattcctccttacatgattgcatcaaaagaggctgttcgagaaggttctccagccaactggaaaagaaaagagaaactgccccaggttacaaggtcttggcacaattacatgtgcaactgcgtcatccaggattttcaagcttccgttcttcaggtgtcagactccacctacgacgaacaagtggctgcacagatgccaaccgtccactacgaattccccaatggctacaactgtgattttggggcagagcggctgaaaattcctgaagggttatttgacccttccaacgtaaagggactgtctgggaacacgatgctgggagtcagtcacgttgtcacaaccagcgtcggaatgtgtgacatcgacatcagaccaggtctctacggcagtgtgatcgtagcaggaggaaacacgctaatacagagtttcactgacaggttaaatagagagctttctcagaaaactccaccaagtatgcggttgaaactgattgcaaacaacacgacggtggagcggaggttcagctcatggattggtggctctatcctagcatctttgggtacctttcaacagatgtggatttctaaacaggaatatgaagaaggagggaagcagtgtgtagaaagaaaatgcccttgagggctccaccctgcctgcccgtcacctcaacgtctgtagctttagtacactcaggaaaagatgaccatcttttgtagaatgtttatacatgtttgcatatttcaatttccacttaaattttttaaggctttaactggctctataaattaaatgagtttgtgctttccttgaaatgcacttattcttattacaggcattttataattttgtatgaatgtctattttctctaaatattttgctttcagtaagtactctccagctctcctgggggttggttggtggaattactctgtattgacaagtacaagttactgcctatgctttgtaccttaggctacaaaactaaataaaaatcactactgtcctag

SEQ ID NO: 145 - protein, 429 aa, Mus musculus
MSGGVYGGDEVGALVFDIGSYTVRAGYAGEDCPKVDFPTAIGVVLERDDGSTMMEIDGDKGKQGGPTYYIDTNALRVPRENMEAISPLKNGMVEDWDSFQAILDHTYKMHVKSEASLHPVLMSEAPWNTRAKREKLTELMFEHYSIPAFFLCKTAVLTAFANGRSTGLILDSGATHTTAIPVHDGYVLQQGIVKSPLAGDFITMQCRELFQEMNIELIPPYMIASKEAVREGSPANWKRKEKLPQVTRSWHNYMCNCVIQDFQASVLQVSDSTYDEQVAAQMPTVHYEFPNGYNCDFGAERLKIPEGLFDPSNVKGLSGNTMLGVSHVVTTSVGMCDIDIRPGLYGSVIVAGGNTLIQSFTDRLNRELSQKTPPSMRLKLIANNTTVERRFSSWIGGSILASLGTFQQMWISKQEYEEGGKQCVERKCP

SEQ ID NO: 146 - DNA, 1940 bp, Homo sapiens
gagtgagcggcgcggggccaatcagcgtgcgccgttccgaaagttgccttttatggctcgagcggccgcggcggcgccctataaaacccagcggcgcgacgcgccaccaccgccgagaccgcgtccgccccgcgagcacagagcctcgcctttgccgatccgccgcccgtccacacccgccgccagctcaccatggatgatgatatcgccgcgctcgtcgtcgacaacggctccggcatgtgcaaggccggcttcgcgggcgacgatgccccccgggccgtcttcccctccatcgtggggcgccccaggcaccagggcgtgatggtgggcatgggtcagaaggattcctatgtgggcgacgaggcccagagcaagagaggcatcctcaccctgaagtaccccatcgagcacggcatcgtcaccaactgggacgacatggagaaaatctggcaccacaccttctacaatgagctgcgtgtggctcccgaggagcaccccgtgctgctgaccgaggcccccctgaaccccaaggccaaccgcgagaagatgacccagatcatgtttgagaccttcaacaccccagccatgtacgttgctatccaggctgtgctatccctgtacgcctctggccgtaccactggcatcgtgatggactccggtgacggggtcacccacactgtgcccatctacgaggggtatgccctcccccatgccatcctgcgtctggacctggctggccgggacctgactgactacctcatgaagatcctcaccgagcgcggctacagcttcaccaccacggccgagcgggaaatcgtgcgtgacattaaggagaagctgtgctacgtcgccctggacttcgagcaagagatggccacggctgcttccagctcctccctggagaagagctacgagctgcctgacggccaggtcatcaccattggcaatgagcggttccgctgccctgaggcactcttccagccttccttcctgggcatggagtcctgtggcatccacgaaactaccttcaactccatcatgaagtgtgacgtggacatccgcaaagacctgtacgccaacacagtgctgtctggcggcaccaccatgtaccctggcattgccgacaggatgcagaaggagatcactgccctggcacccagcacaatgaagatcaagatcattgctcctcctgagcgcaagtactccgtgtggatcggcggctccatcctggcctcgctgtccaccttccagcagatgtggatcagcaagcaggagtatgacgagtccggcccctccatcgtccaccgcaaatgcttctaggcggactatgacttagttgcgttacaccctttcttgacaaaacctaacttgcgcagaaaacaagatgagattggcatggctttatttgttttttttgttttgttttggttttttttttttttttggcttgactcaggatttaaaaactggaacggtgaaggtgacagcagtcggttggagcgagcatcccccaaagttcacaatgtggccgaggactttgattgcacattgttgtttttttaatagtcattccaaatatgagatgcgttgttacaggaagtcccttgccatcctaaaagccaccccacttctctctaaggagaatggcccagtcctctcccaagtccacacaggggaggtgatagcattgctttcgtgtaaattatgtaatgcaaaatttttttaatcttcgccttaatacttttttattttgttttattttgaatgatgagccttcgtgcccccccttcccccttttttgtcccccaacttgagatgtatgaaggcttttggtctccctgggagtgggtggaggcagccagggcttacctgtacactgacttgagaccagttgaataaaagtgcacaccttaaaaatgaggaaaaaaaaaaaaaaaaaa

SEQ ID NO: 147 - protein, 375 aa, Homo sapiens
MDDDIAALVVDNGSGMCKAGFAGDDAPRAVFPSIVGRPRHQGVMVGMGQKDSYVGDEAQSKRGILTLKYPIEHGIVTNWDDMEKIWHHTFYNELRVAPEEHPVLLTEAPLNPKANREKMTQIMFETFNTPAMYVAIQAVLSLYASGRTTGIVMDSGDGVTHTVPIYEGYALPHAILRLDLAGRDLTDYLMKILTERGYSFTTTAEREIVRDIKEKLCYVALDFEQEMATAASSSSLEKSYELPDGQVITIGNERFRCPEALFQPSFLGMESCGIHETTFNSIMKCDVDIRKDLYANTVLSGGTTMYPGIADRMQKEITALAPSTMKIKIIAPPERKYSVWIGGSILASLSTFQQMWISKQEYDESGPSIVHRKCF

SEQ ID NO: 148 - DNA, 1935 bp, Mus musculus
tataaaacccggcggcgcaacgcgcagccactgtcgagtcgcgtccacccgcgagcacagcttctttgcagctccttcgttgccggtccacacccgccaccagttcgccatggatgacgatatcgctgcgctggtcgtcgacaacggctccggcatgtgcaaagccggcttcgcgggcgacgatgctccccgggctgtattcccctccatcgtgggccgccctaggcaccagggtgtgatggtgggaatgggtcagaaggactcctatgtgggtgacgaggcccagagcaagagaggtatcctgaccctgaagtaccccattgaacatggcattgttaccaactgggacgacatggagaagatctggcaccacaccttctacaatgagctgcgtgtggcccctgaggagcaccctgtgctgctcaccgaggcccccctgaaccctaaggccaaccgtgaaaagatgacccagatcatgtttgagaccttcaacaccccagccatgtacgtagccatccaggctgtgctgtccctgtatgcctctggtcgtaccacaggcattgtgatggactccggagacggggtcacccacactgtgcccatctacgagggctatgctctccctcacgccatcctgcgtctggacctggctggccgggacctgacagactacctcatgaagatcctgaccgagcgtggctacagcttcaccaccacagctgagagggaaatcgtgcgtgacatcaaagagaagctgtgctatgttgctctagacttcgagcaggagatggccactgccgcatcctcttcctccctggagaagagctatgagctgcctgacggccaggtcatcactattggcaacgagcggttccgatgccctgaggctcttttccagccttccttcttgggtatggaatcctgtggcatccatgaaactacattcaattccatcatgaagtgtgacgttgacatccgtaaagacctctatgccaacacagtgctgtctggtggtaccaccatgtacccaggcattgctgacaggatgcagaaggagattactgctctggctcctagcaccatgaagatcaagatcattgctcctcctgagcgcaagtactctgtgtggatcggtggctccatcctggcctcactgtccaccttccagcagatgtggatcagcaagcaggagtacgatgagtccggcccctccatcgtgcaccgcaagtgcttctaggcggactgttactgagctgcgttttacaccctttctttgacaaaacctaacttgcgcagaaaaaaaaaaaataagagacaacattggcatggctttgtttttttaaattttttttaaagtttttttttttttttttttttttttttttaagtttttttgttttgttttggcgcttttgactcaggatttaaaaactggaacggtgaaggcgacagcagttggttggagcaaacatcccccaaagttctacaaatgtggctgaggactttgtacattgttttgtttttttttttttttggttttgtctttttttaatagtcattccaagtatccatgaaataagtggttacaggaagtccctcaccctcccaaaagccacccccactcctaagaggaggatggtcgcgtccatgccctgagtccaccccggggaaggtgacagcattgcttctgtgtaaattatgtactgcaaaaatttttttaaatcttccgccttaatacttcatttttgtttttaatttctgaatggcccaggtctgaggcctcccttttttttgtccccccaacttgatgtatgaaggctttggtctccctgggagggggttgaggtgttgaggcagccagggctggcctgtacactgacttgagaccaataaaagtgcacaccttaccttacacaaacaaaaaaaaaaaaaaaa

SEQ ID NO: 149 - protein, 375 aa, Mus musculus; identical to SEQ ID NO: 147

SEQ ID NO: 150 - DNA, 3783 bp, Homo sapiens
actgggccaggcgcgcggcggccccgggctttgtgtgtgtgtgtatgtgtgtgtgtgtgtgtgtgtgtgtgtgagtgtgtgcgtgtgagagtgcgagtgtctgtgcgcgagtgagtgagcggcgggcgggcgcgagtgtggccgccgcggagcgcgagcaggacccggcgggcgcgctccccagcctccgtctccccgccggaaccatgtcgggcaggtcggttcgagccgagacgaggagccgggccaaagatgatatcaagagggtcatggcggcgatcgagaaagtgcgcaaatgggagaagaaatgggtgaccgttggtgacacatccctacgaatctacaaatgggtccctgtgacggagcccaaggttgatgacaaaaacaagaataagaaaaaaggcaaggacgagaagtgtggctcagaggtgaccactccggagaacagttcctccccagggatgatggacatgcatgacgataacagcaaccagagctccatcgcagatgcctcccccatcaaacaggagaacagcagcaactccagccccgctccagagcccaactcggctgtgcccagcgacggcaccgaggccaaggtggatgaggcccaggctgatgggaaggagcacccaggagctgaagatgcttctgatgagcagaattcacagtcctcgatggaacattcgatgaacagctcagagaaagtagatcggcagccgtctggagactcgggtctggccgcagagacgtctgcaatctctcaggtacctcgctcgaggtctcagaggggcagccagatcggccgggagcccattgggttgtcgggggatttggaaggagtgccaccctctaaaaagatgaaactggaggcctctcaacaaaactccgaagagatgtagacgatgctttaaagcctccgatccatgttccatggaaggtacatcagcaattaattctagagcaactttgccccagcgattcctcttgggtgcgaacagaactactaacgtttcaagtttaccaagtgcaaatccaagaagacccagaacggcgtcacttctcagacactgaagaactctgctgtgaagcaaaacactcaaacctttaagggactgtccttggggaggcaggcggggctgacagctcaggagtgtctgcacactgtctcggaagccaggattccatttgtgttgctgctgtattttccccccacttctctatgtaacgatataagctatcggagggtggtaccgatcaggaacgctttttggcggggctttccactgttcaaccgattccttccgctttctttttttgtgccttgtgcccttgaggtgacctctggcatgtatcctggtggttcttacatccccctctgcaaagtgccctcttggtttggttcgggcggcggctgccaccctactcaccgctctcctccctgccccaggacttcatcggagcaggcagggtggagcgaaggagctccttagcccacctggtttgcaggtgcagggggaccttaggcacgccccaagcaccaggcaccagggcccaaggacgcgcaggtgttggggcacagtccccaagggctcggccccttggatcaggctgggcactcgctgtgctctcccctccttggggcgtttaggactgggcgtctccaagcccaccatggcccagatggacgtgcaaagcccttggaattttctggcacttcctctctattgcccccaccaccaccacccccatcactgctttctcccagacctccgaatacgaaatggcttctctggctgactgcaaggctgtctccttaaggcactgagtgggccggggaggctgggagccggcggcaggattagctggtgctgaactttctctcataggacgtcgcttggatttcaaatccacggtcacctgctgccctttgcctcccccgacgccccagcctgtgccccggagaggcaggatcgcagtggtcagaatccacgtgctttcctattctcaggctgttctgactctgagccaacagctggaccgtgtctcatccccagaacatgccgtctgtccccaccggggagtgggccttgatggccgggcctcgaaggccacaaacaaggcgtcgaggaattggaaagatttgcacaccctccagaaaggagagacgcaatctcccctccctcccatcccccaccttcgctggaacagcttcctctcactgaacggagacgcccccttggacgaactgcctaatcgtttggttctgaggcctggtttgctcttaattaatatatgaactcctcagaccttaaaccttttcctaagctttctttactgcactggagttctgactccctttgagttgtgtgttactgggggtggggtggggtcatgggttttgttgtttttgggggctaattggtgcatattcaggtaccacctttgacgtgtggctctttctcctgaccatcatgggaagtgtctgctggattccattttctaagagtttctgagggtgaggctcttatttttttttttaagggatcctgtctatttcctgcacttcgagaagaatcaaaatgttcctgaatttcaaatacctcatgcaaaatgtctcctgaaataagggaaaaaaaaaaaaccacaactttgaaaatcttaatgttgaagttagcaatgccgaaaggtttctgtcttaaaaaaaaaaatccttgtacttatcaattttgccccttaggcagtcagttttgttgagaactgtgtcctgcatcctggcgcagaacctacctgatgcggttcctctccacgcatctcgaggcggcgttacctccagattccgtagagttagagtcacatttttctttgcagcgaaactccatcttggtgagagatgaatttggatatttatttccttctctgtttttgggaaacgagaggctacaaccaagacagctgaaggagaatgaaacacacacatccacagaaacagagaggcgtaggtggccctgccgttgaccgcagcctctctggacaggcaaggggagttggcgcaggtgaggactcagacgacgtccaccgtcccaaggctgtcactagtatttctctgaagtgcctgaaggtaggaatgggccggcgattgggaccagctgggccccaccacggccacgccaggcaaagcgccagcagccctgcactccacgctggccaagaaggccttccacgcagaatgacaagactgcaaaaatccgatgtgcttccttccctggcgcagtcgctcctcgagccgctgccccccacccaccctgcacccctcgccctccccccaccacagaatctaagacctttcagcttcgagccagggggcgggggatcccgagcaaaagccttccgtggacatcaggccccgtggcctcaagggctcccagggcaaacctaattccccccaaaacgtgaagtcggggaagctgcggctacacattccacaaagtgctggcacttacacccacaacccggaaggctgtggaccgattcctctagggtggtgacctcccattagcaaacggtgtcatggtttggaatgttcattatcgccaagaacctggttagaggcataaagaccttttttcaccgttacctaattttttcccctttcaagaattttttttttttttggtgtgttgtacagcagtataatttttcacttatttattccatcagtagatatggtttgtacaatgtacaattgtttcatttcagaaaataaaaatttcaaatcatgaa

SEQ ID NO: 151 - protein, 231 aa, Homo sapiens
MSGRSVRAETRSRAKDDIKRVMAAIEKVRKWEKKWVTVGDTSLRIYKWVPVTEPKVDDKNKNKKKGKDEKCGSEVTTPENSSSPGMMDMHDDNSNQSSIADASPIKQENSSNSSPAPEPNSAVPSDGTEAKVDEAQADGKEHPGAEDASDEQNSQSSMEHSMNSSEKVDRQPSGDSGLAAETSAISQVPRSRSQRGSQIGREPIGLSGDLEGVPPSKKMKLEASQQNSEEM

SEQ ID NO: 152 - DNA, 3720 bp, Homo sapiens
actgggccaggcgcgcggcggccccgggctttgtgtgtgtgtgtatgtgtgtgtgtgtgtgtgtgtgtgtgtgagtgtgtgcgtgtgagagtgcgagtgtctgtgcgcgagtgagtgagcggcgggcgggcgcgagtgtggccgccgcggagcgcgagcaggacccggcgggcgcgctccccagcctccgtctccccgccggaaccatgtcgggcaggtcggttcgagccgagacgaggagccgggccaaagatgatatcaagagggtcatggcggcgatcgagaaagtgcgcaaatgggagaagaaatgggtgaccgttggtgacacatccctacgaatctacaaatgggtccctgtgacggagcccaaggttgatgacaaaaacaagaataagaaaaaaggcaaggacgagaagtgtggctcagaggtgaccactccggagaacagttcctccccagggatgatggacatgcatgacgataacagcaaccagagctccatcgcagatgcctcccccatcaaacaggagaacagcagcaactccagccccgctccagagcccaactcggctgtgcccagcgacggcaccgaggccaaggtggatgaggcccaggctgatgggaaggagcacccaggagctgaagatgcttctgatgagcagaattcacagtcctcgatggaacattcgatgaacagctcagagaaagtagatcggcagccgtctggagactcgggtctggccgcagagacgtctgcaatctctcaggatttggaaggagtgccaccctctaaaaagatgaaactggaggcctctcaacaaaactccgaagagatgtagacgatgctttaaagcctccgatccatgttccatggaaggtacatcagcaattaattctagagcaactttgccccagcgattcctcttgggtgcgaacagaactactaacgtttcaagtttaccaagtgcaaatccaagaagacccagaacggcgtcacttctcagacactgaagaactctgctgtgaagcaaaacactcaaacctttaagggactgtccttggggaggcaggcggggctgacagctcaggagtgtctgcacactgtctcggaagccaggattccatttgtgttgctgctgtattttccccccacttctctatgtaacgatataagctatcggagggtggtaccgatcaggaacgctttttggcggggctttccactgttcaaccgattccttccgctttctttttttgtgccttgtgcccttgaggtgacctctggcatgtatcctggtggttcttacatccccctctgcaaagtgccctcttggtttggttcgggcggcggctgccaccctactcaccgctctcctccctgccccaggacttcatcggagcaggcagggtggagcgaaggagctccttagcccacctggtttgcaggtgcagggggaccttaggcacgccccaagcaccaggcaccagggcccaaggacgcgcaggtgttggggcacagtccccaagggctcggccccttggatcaggctgggcactcgctgtgctctcccctccttggggcgtttaggactgggcgtctccaagcccaccatggcccagatggacgtgcaaagcccttggaattttctggcacttcctctctattgcccccaccaccaccacccccatcactgctttctcccagacctccgaatacgaaatggcttctctggctgactgcaaggctgtctccttaaggcactgagtgggccggggaggctgggagccggcggcaggattagctggtgctgaactttctctcataggacgtcgcttggatttcaaatccacggtcacctgctgccctttgcctcccccgacgccccagcctgtgccccggagaggcaggatcgcagtggtcagaatccacgtgctttcctattctcaggctgttctgactctgagccaacagctggaccgtgtctcatccccagaacatgccgtctgtccccaccggggagtgggccttgatggccgggcctcgaaggccacaaacaaggcgtcgaggaattggaaagatttgcacaccctccagaaaggagagacgcaatctcccctccctcccatcccccaccttcgctggaacagcttcctctcactgaacggagacgcccccttggacgaactgcctaatcgtttggttctgaggcctggtttgctcttaattaatatatgaactcctcagaccttaaaccttttcctaagctttctttactgcactggagttctgactccctttgagttgtgtgttactgggggtggggtggggtcatgggttttgttgtttttgggggctaattggtgcatattcaggtaccacctttgacgtgtggctctttctcctgaccatcatgggaagtgtctgctggattccattttctaagagtttctgagggtgaggctcttatttttttttttaagggatcctgtctatttcctgcacttcgagaagaatcaaaatgttcctgaatttcaaatacctcatgcaaaatgtctcctgaaataagggaaaaaaaaaaaaccacaactttgaaaatcttaatgttgaagttagcaatgccgaaaggtttctgtcttaaaaaaaaaaatccttgtacttatcaattttgccccttaggcagtcagttttgttgagaactgtgtcctgcatcctggcgcagaacctacctgatgcggttcctctccacgcatctcgaggcggcgttacctccagattccgtagagttagagtcacatttttctttgcagcgaaactccatcttggtgagagatgaatttggatatttatttccttctctgtttttgggaaacgagaggctacaaccaagacagctgaaggagaatgaaacacacacatccacagaaacagagaggcgtaggtggccctgccgttgaccgcagcctctctggacaggcaaggggagttggcgcaggtgaggactcagacgacgtccaccgtcccaaggctgtcactagtatttctctgaagtgcctgaaggtaggaatgggccggcgattgggaccagctgggccccaccacggccacgccaggcaaagcgccagcagccctgcactccacgctggccaagaaggccttccacgcagaatgacaagactgcaaaaatccgatgtgcttccttccctggcgcagtcgctcctcgagccgctgccccccacccaccctgcacccctcgccctccccccaccacagaatctaagacctttcagcttcgagccagggggcgggggatcccgagcaaaagccttccgtggacatcaggccccgtggcctcaagggctcccagggcaaacctaattccccccaaaacgtgaagtcggggaagctgcggctacacattccacaaagtgctggcacttacacccacaacccggaaggctgtggaccgattcctctagggtggtgacctcccattagcaaacggtgtcatggtttggaatgttcattatcgccaagaacctggttagaggcataaagaccttttttcaccgttacctaattttttcccctttcaagaattttttttttttttggtgtgttgtacagcagtataatttttcacttatttattccatcagtagatatggtttgtacaatgtacaattgtttcatttcagaaaataaaaatttcaaatcatgaa

SEQ ID NO: 153 - protein, 210 aa, Homo sapiens
MSGRSVRAETRSRAKDDIKRVMAAIEKVRKWEKKWVTVGDTSLRIYKWVPVTEPKVDDKNKNKKKGKDEKCGSEVTTPENSSSPGMMDMHDDNSNQSSIADASPIKQENSSNSSPAPEPNSAVPSDGTEAKVDEAQADGKEHPGAEDASDEQNSQSSMEHSMNSSEKVDRQPSGDSGLAAETSAISQDLEGVPPSKKMKLEASQQNSEEM

SEQ ID NO: 154 - DNA, 3809 bp, Mus musculus
ttgcgcactgggccccgggcgcgcggcggcaccaggctttgtgtgtgcgcgtatgtgtgtgagtgtgtgtctgtgcgcgagtgagagagcgggcgagtgtggcgagcaggacccggcgggcgcgctcccccagcctccctctctctctctctttcctctctctctccctccccgccagaaccatgtcgggcaggtcggttcgagccgagaccaggagccgggccaaagatgatatcaagagggtcatggcggctatcgagaaagtgcgcaaatgggagaagaaatgggtgaccgttggcgatacatccctacgaatctacaagtgggtccctgtgacggagccaaaggttgatgataaaaacaagaacaagaagaaaggcaaggacgagaagtgtggctcggaggtgaccactccagagaacagctcgtctcctgggatgatggacatgcacgatgataacagcaaccagagctccatagcagacgcctcccccatcaagcaagagaacagcagcaactccagccctgccccagagaccaacccacccgtgcccagcgatggcaccgaagccaaggctgatgaggcgcaggccgatggaaaagagcaccctggagctgaagatgcatccgaggagcaaaattcacagtcttcgatggaaaactcggtgaacagctccgagaaggcagaacggcagccatctgcagaatcagggttagcggcagaaacgtcggcagtctctcaggatttggaaggagtgccgccgtctaaaaagatgaagctggaagcctctcaacagaactcagaagagatgtagacggcccggcggaaccttctggtccatgtttcatggcaggtacatcggcaggcttaattctagaaacacggcccaagcgactcctcttgggcgcgagcagaactaacgtttcaagtttactaaagtgcaaatccaagaagaacctagagcggcggcggcagcggaacttcgcagacacttgacggactctgccgtgaaaccgaaacactcgaaccttcaagtgactgccctctgggaggtgggtcgacagctcaggagtgtgtgcgcactgtctcggaagccaagattacatttgtgttgctgctgtatccccctcccctcacttctctatttaacgatataagctattcgagggtggtaccaatcaggaatttgctttccataggggcttttggctcttcaaccaattccttctgctttctttttttgtgccttgtaccctagaggtgacctccggcatgcttcctggtttttgcatctctcctggcaaagtgcccacttgttttggttggctgctgcccccacccccaccccttattgcctctctcctccctgccccaagactgcttcaaagcaagcagggtagagcggcgggagaccaggcacctttcagtgacccccttggttcaggtgagcagtgtttgggcacaccctgagccccaacttccagggcccctggggctacaagtttgcgggggccggtttcccgagggctggcctccttggtcaggacacgccctcaccttttggagccatggaggctaggcgtttgcaaggcaaggtagcccagattgacatgcaaaagcctttagatttttctggcacttccaccctatctcccctccgccccctaacctcacaccccgactctggccacaactggcactgcgctctccaggtcctccgaagacgaaatgaccaactgagcttgtctccttaggatagtaaagggctgggaggttgggagccggcggccggcaggaatagctggtgctgaactaactctcccataggacattgcttggatttcaaatccatggtaacctgctgccctttgtccctgtctcctatccaccgcaccccaagccccccaaaaccccaggcaggatgcgcctggtatggcctgactctgagaggctacaggtggatggagacccattcccagtaccgcgctgttggtctcctctggggaccggaccttaaccattgggcctcaggccagaagcaaggcacagaggaaccgggaagatttgcacacagatttgcccccccagaaaggagcctccgaggcacttccttcccctgctcttccttgcacggagacagctctctctcactcagtggagacgccacttggacagacggactgctcagctgttgatttctgaggcctggtttgctcttaatccctttgctggacccctcagatctgaaaaccttcccctatgctttcttactgcactggagttcgaactccctatgagttgtgtgttggggggaggggcgggcggggtgggttttgtttttttgttgttcttgtttcgttttgtttcgtttgctaattggtgcatattcaggtaccaccttttgacgtgtggatctttctccaaaccaccacaagaagtgtctgccgggctccgttttctaagagtttctgaggggacagctcccatttctttttttggtttcaagggagctgtctatttcctatacttcaagaagaatcaaaatgttcctgaattttaaatacctcatgcaaaaatatctcctgaaataagggaaaaaaaaaaaactttgaaaaatcgtaatgttgaagttagcgatgctaaaatgtttctgtcttaaaaaacaaaaaaattgttgtaatacttagcgattttgcccctcaggcggtcagttctgtccagaactgtgttctgcgtcttggcccggaagcaaccggatgcatgacctctgaacggatctcaaggccaaggcatctttacctccagattctagagttagggcaacaacagttttcttttgcagcaaaactccgttctggtgaaagatgaatttggatatttatttctttttctgggaaacaagaggttaaacaacgtaagcagctgagggagaacccaacacgggcatccacggaaccagcgggcgcggccagggccgcctatacctcttctaccctccgcagcctctctggacagtcaggaggagtcgatacagttgagaaagaagacaacgatgaggttcgaggtaccgaggctgtcattagtttttctctgaagtgcctgaacgtaggaatgggccgtcgacggaggggaccattcggatgttcccccacctcgcgacggccgcgccaggcaaagagccagcagccctgcactccacactggccaggaaaagccttccacgaggagcggtcagactgcaaaatccaatgtgcttccttccccgccacggtcctctctctctctcggggagccgatggtccccgtccctgaaccccctagcccgcatccccaccacagaatctaagacctttcatctggccgagccaggggcaaaggggatcctaagcaaatgccttccgtggacaacaggccccacggcctaaagggctcccagggcaaactttcccccaacacttgaaggggggtgggggggatggcggctacacattccactaagtgcagcactcgcacccacaacccggaaggaaggctcttaagcgattctcagagggtggtgactgcccatcatcgtcagacggtgtcgtggtttggaatgttaattatcgcagaggacctggtagaggtataaagaccttttttcactgttacctaattttttttttcctcttacaattttttttttggtgtgttgtacagcagtataatttttcacttatttattccatcggtagatattgtttgtacaatgtacaatggtttcatttcagaaaataataataataaaaaaaaaagttctgatcatgag

SEQ ID NO: 155 - protein, 210 aa, Mus musculus
MSGRSVRAETRSRAKDDIKRVMAAIEKVRKWEKKWVTVGDTSLRIYKWVPVTEPKVDDKNKNKKKGKDEKCGSEVTTPENSSSPGMMDMHDDNSNQSSIADASPIKQENSSNSSPAPETNPPVPSDGTEAKADEAQADGKEHPGAEDASEEQNSQSSMENSVNSSEKAERQPSAESGLAAETSAVSQDLEGVPPSKKMKLEASQQNSEEM

SEQ ID NO: 156 - DNA, 1729 bp, Homo sapiens
gcgggcgggtgcgcgcgctttctcgcgcacgcgcgcacggagggggcgacggccgctgtgacgctgcggcggcggcgggcgggcggcggcgcgtgaggcgcgcgatccccggtgtcttgggagcagtgccccggcccccgccgctcccgccgccgccatgtcgggccggtcggtccgggcggagacccgcagccgggccaaggacgacatcaagaaggtgatggcggccatcgagaaagtgcggaaatgggagaagaagtgggtgactgtgggtgacacgtccctgaggatatttaagtgggttcctgtgacagacagcaaggagaaagaaaagtcaaaatcgaacagttcagcagcccgagaacctaatggctttccttctgatgcctcagccaattcctctctccttcttgaattccaggacgaaaacagcaaccagagttccgtgtctgacgtctatcagcttaaggtggacagcagcaccaactcaagccccagcccccagcagagtgagtccctgagcccagcacacacctccgacttccgcacggatgactcccagcccccaacgctgggccaggagatcctggaggagccctccctgccctcctcggaagttgctgatgaacctcctaccctcaccaaggaagaaccagttccactagagacacaggtcgttgaggaagaggaagactcaggtgccccgcccctgaagcgcttctgtgtggaccaacccacagtgccgcagacggcgtcagaaagctagcaccatcccggccctccgcctcctggccctgcctctatttattgcattctggttctggccgcgccgcgttgctggggtaagggcaagcactggggtcaagagcctgcacacatgagccttccgggctggaaggctggcgtaggacttggggctgtagcatcatcttcctgaccctggcacctgtgtctacttgctcccgagaagaggagcgctcatgtcttttttgcaccccaagttggctggagcatcggccaccccaagattcatctgtgacctccaggcagcagtctctgctccagaatctctggacggagctgctggcagcttctgcgagaagagagagatgtggaaggcaccttctagaagagagcgtgcctcaggttacttgaacttgaacggagactgtagactcccggactttcccctaggactgggggccctgtaggctgctgttggaggactgggtagagacattggagggaagggaagggcttttctccacacaagggcagagagtccgtctagatttcttgctgtcctgccagctctgcccatgcctgaggtggtcctacctctcacgggcaccctagctgctgacagccctttgtggccgccgtccccatcccctgccctcagcacacacatctgcacacacgcagctttgttctcacctctacctgtcattccagcatccctgcctcttgtcacaaactgccccagcaagaatttgaggttctgacaacagtacccatcccccacagtaccccttcagctcagtttctagaaagctcccttttctttgaaatctgcatgttgaattgaactttgtgattttattttttgtttcaaaaaagtttaagaaaatggaaatgggcaacagtgagtgaagacatattttagcactgaatagaatatttttaaaattaaactatttgaaatatgtccaaaaaaaaaaaaaaaaaa

SEQ ID NO: 157 - protein, 202 aa, Homo sapiens
MSGRSVRAETRSRAKDDIKKVMAAIEKVRKWEKKWVTVGDTSLRIFKWVPVTDSKEKEKSKSNSSAAREPNGFPSDASANSSLLLEFQDENSNQSSVSDVYQLKVDSSTNSSPSPQQSESLSPAHTSDFRTDDSQPPTLGQEILEEPSLPSSEVADEPPTLTKEEPVPLETQVVEEEEDSGAPPLKRFCVDQPTVPQTASES

SEQ ID NO: 158 - DNA, 1558 bp, Homo sapiens
gcgggcgggtgcgcgcgctttctcgcgcacgcgcgcacggagggggcgacggccgctgtgacgctgcggcggcggcgggcgggcggcggcgcgtgaggcgcgcgatccccggtgtcttgggagcagtgccccggcccccgccgctcccgccgccgccatgtcgggccggtcggtccgggcggagacccgcagccgggccaaggacgacatcaagaaggtgatggcggccatcgagaaagtgcggaaatgggagaagaagtgggtgactgtgggtgacacgtccctgaggatatttaagtgggttcctgtgacagacagcaaggagaaagaaaagtcaaaatcgaacagttcagcagcccgagaacctaatggctttccttctgatgcctcagccaattcctctctccttcttgaattccaggagccctccctgccctcctcggaagttgctgatgaacctcctaccctcaccaaggaagaaccagttccactagagacacaggtcgttgaggaagaggaagactcaggtgccccgcccctgaagcgcttctgtgtggaccaacccacagtgccgcagacggcgtcagaaagctagcaccatcccggccctccgcctcctggccctgcctctatttattgcattctggttctggccgcgccgcgttgctggggtaagggcaagcactggggtcaagagcctgcacacatgagccttccgggctggaaggctggcgtaggacttggggctgtagcatcatcttcctgaccctggcacctgtgtctacttgctcccgagaagaggagcgctcatgtcttttttgcaccccaagttggctggagcatcggccaccccaagattcatctgtgacctccaggcagcagtctctgctccagaatctctggacggagctgctggcagcttctgcgagaagagagagatgtggaaggcaccttctagaagagagcgtgcctcaggttacttgaacttgaacggagactgtagactcccggactttcccctaggactgggggccctgtaggctgctgttggaggactgggtagagacattggagggaagggaagggcttttctccacacaagggcagagagtccgtctagatttcttgctgtcctgccagctctgcccatgcctgaggtggtcctacctctcacgggcaccctagctgctgacagccctttgtggccgccgtccccatcccctgccctcagcacacacatctgcacacacgcagctttgttctcacctctacctgtcattccagcatccctgcctcttgtcacaaactgccccagcaagaatttgaggttctgacaacagtacccatcccccacagtaccccttcagctcagtttctagaaagctcccttttctttgaaatctgcatgttgaattgaactttgtgattttattttttgtttcaaaaaagtttaagaaaatggaaatgggcaacagtgagtgaagacatattttagcactgaatagaatatttttaaaattaaactatttgaaatatgtccaaaaaaaaaaaaaaaaaa

SEQ ID NO: 159 - protein, 145 aa, Homo sapiens
MSGRSVRAETRSRAKDDIKKVMAAIEKVRKWEKKWVTVGDTSLRIFKWVPVTDSKEKEKSKSNSSAAREPNGFPSDASANSSLLLEFQEPSLPSSEVADEPPTLTKEEPVPLETQVVEEEEDSGAPPLKRFCVDQPTVPQTASES

SEQ ID NO: 160 - DNA, 1851 bp, Homo sapiens
gcgggcgggtgcgcgcgctttctcgcgcacgcgcgcacggagggggcgacggccgctgtgacgctgcggcggcggcgggcgggcggcggcgcgtgaggcgcgcgatccccggtgtcttgggagcagtgccccggcccccgccgctcccgccgccgccatgtcgggccggtcggtccgggcggagacccgcagccgggccaaggacgacatcaagaaggtgatggcggccatcgagaaagtgcggaaatgacggaatctcgctctgtcacccaggctggagtgcattggcgcaatctcggctcactgcaacctctgcctctcaggttcaagcaattctcctgcctcagcctcctgagtagctgggactacagggagaagaagtgggtgactgtgggtgacacgtccctgaggatatttaagtgggttcctgtgacagacagcaaggagaaagaaaagtcaaaatcgaacagttcagcagcccgagaacctaatggctttccttctgatgcctcagccaattcctctctccttcttgaattccaggacgaaaacagcaaccagagttccgtgtctgacgtctatcagcttaaggtggacagcagcaccaactcaagccccagcccccagcagagtgagtccctgagcccagcacacacctccgacttccgcacggatgactcccagcccccaacgctgggccaggagatcctggaggagccctccctgccctcctcggaagttgctgatgaacctcctaccctcaccaaggaagaaccagttccactagagacacaggtcgttgaggaagaggaagactcaggtgccccgcccctgaagcgcttctgtgtggaccaacccacagtgccgcagacggcgtcagaaagctagcaccatcccggccctccgcctcctggccctgcctctatttattgcattctggttctggccgcgccgcgttgctggggtaagggcaagcactggggtcaagagcctgcacacatgagccttccgggctggaaggctggcgtaggacttggggctgtagcatcatcttcctgaccctggcacctgtgtctacttgctcccgagaagaggagcgctcatgtcttttttgcaccccaagttggctggagcatcggccaccccaagattcatctgtgacctccaggcagcagtctctgctccagaatctctggacggagctgctggcagcttctgcgagaagagagagatgtggaaggcaccttctagaagagagcgtgcctcaggttacttgaacttgaacggagactgtagactcccggactttcccctaggactgggggccctgtaggctgctgttggaggactgggtagagacattggagggaagggaagggcttttctccacacaagggcagagagtccgtctagatttcttgctgtcctgccagctctgcccatgcctgaggtggtcctacctctcacgggcaccctagctgctgacagccctttgtggccgccgtccccatcccctgccctcagcacacacatctgcacacacgcagctttgttctcacctctacctgtcattccagcatccctgcctcttgtcacaaactgccccagcaagaatttgaggttctgacaacagtacccatcccccacagtaccccttcagctcagtttctagaaagctcccttttctttgaaatctgcatgttgaattgaactttgtgattttattttttgtttcaaaaaagtttaagaaaatggaaatgggcaacagtgagtgaagacatattttagcactgaatagaatatttttaaaattaaactatttgaaatatgtccaaaaaaaaaaaaaaaaaa

SEQ ID NO: 161 - protein, 213 aa, Homo sapiens
MTESRSVTQAGVHWRNLGSLQPLPLRFKQFSCLSLLSSWDYREKKWVTVGDTSLRIFKWVPVTDSKEKEKSKSNSSAAREPNGFPSDASANSSLLLEFQDENSNQSSVSDVYQLKVDSSTNSSPSPQQSESLSPAHTSDFRTDDSQPPTLGQEILEEPSLPSSEVADEPPTLTKEEPVPLETQVVEEEEDSGAPPLKRFCVDQPTVPQTASES

SEQ ID NO: 162 - DNA, 1678 bp, Mus musculus
acgcgcgcacggagggggggcgacggccgcggtgacgtgctgcggtggcagcgggtggacggcgacgcgtgaggcgcgtgatatcccgcgtcttgggagcactgtcccggcccccagccactccccgccgccgccatgtccggccgttcggtccgggccgagacccgtagccgggctaaagatgacatcaagaaggtgatggcggccatcgagaaagtgcggaaatgggagaagaaatgggtgactgtgggtgatacctccctgaggatattcaaatgggtgcctgtgacagatagcaaggagaaagaaaagtcaaaatcgaataatacagcagcccgggaacctaatggctttccctctgacgcctcagccaattcctccctcctccttgaattccaggatgagaacagcaaccagagctctgtgtcggatgtctatcaactcaaggtggacagcagcaccaactcaagtcccagcccccagcagagcgagtccctgagcccagcacacacctcagacttccgcactgatgactcccagccccccacattgggccaggagatcctggaggaaccttcgctgcctgcatctgaagttgcagatgaacctcccacactcacaaaggaagagccagtgccggtggagacacagaccactgaggaagaggaggactctggtgctccgcccttgaagagattctgtgtggaccaacctgtagtaccgcagaccacgtcggaaagctagcaccgtcctggcccctcgcctcctggcccctgcctctatttattgcattctggtctggccgagctctgatgctggggtccgggcaagcactagggtccagagcctgtgcgtgggagccctctgggctagaaggctgatggagggcgtggggtcgtcgcaccatcttcttgttcctgacacttgtgtctgcttgctcttgagcaaaggagcgctcacatcttttctgtagcccaagtaggccagagcatcagggttcatttctcacctccagaaccactgcacggagctgctggcgccgccacggggagaaaggtgtggaaggcgcccacctgagagaagagtgcctaggattacttgaattgaatggagactgtggagtatggactttgccacagggccaggccctgcaggctgctgctgggagagggactgaccggtagagatgtggagaacaccggagagaggctcttccgggacggaggggctttcgccacctttgggcagaagacccatgggagatgcatcctgtgcctgaggcagacctgcctctgttggatgccccagctgctcccagccctgtgcctgccagaaccttctgctgcatcctcacactcactaagcacacctgaagctttctattcacccgtcctttcattccaacgtccccacctcctcctgcagaaaaccccagccatgattggaggttctgaccacagtacctgccccagtactccttcagctcagactttctagaaagttcctttttctttaaaatctgcatgtttaattaaactttatgattttattttttgtctgaaaaaagaaaagtttaagaaaatggaaatgggtaacagcaagtgaagacctattttagcactgaatagagtatttttaaaattaaactttgaaatatgtcttgttaaaaaaaaaaaaa

SEQ ID NO: 163 - protein, 202 aa, Mus musculus
MSGRSVRAETRSRAKDDIKKVMAAIEKVRKWEKKWVTVGDTSLRIFKWVPVTDSKEKEKSKSNNTAAREPNGFPSDASANSSLLLEFQDENSNQSSVSDVYQLKVDSSTNSSPSPQQSESLSPAHTSDFRTDDSQPPTLGQEILEEPSLPASEVADEPPTLTKEEPVPVETQTTEEEEDSGAPPLKRFCVDQPVVPQTTSES

SEQ ID NO: 164 - DNA, 1998 bp, Homo sapiens
tccgtccccaactcgcgcgtccgtccccaactcccgctctcggcggcgggcagggggcgctgagcgtccaggcgctccaagggggcgggcccgggtcggggcggggccggccgggcttccaggcctgggctctggccgcccgcgccaccgggccgctccggggacaggccggggcggggcgcggcggcaggaaacggggcggggacttgcggaggcgttggggacgagagagggcgcggccaactccaggggggacggcaggccgagagcgcggcgcccgggcctggcgcggagcctgagcccgccggacgggaggcggccccgccgcgggctcggccccggccccagccccgccagcatggccggccggactgtacgggccgagacccggagccgggccaaggatgacatcaagaaggtgatggcgaccatcgagaaggtccggagatgggagaagcgatgggtgactgtgggcgacacttcccttcgtatcttcaagtgggtgccagtggtggatccccaggaggaggagcgaaggcgggcaggtggcggggcagagagatcccgtggccgggaacgtcggggcaggggcgccagtccccgagggggtggccctctcatcctgctggatcttaatgatgagaacagcaaccagagtttccattcggaaggttccctgcaaaagggcacagagcccagtcctgggggcaccccccagcccagccgccctgtgtcacctgccggacccccagaaggggtccctgaggaggctcagcccccacggctgggccaagagagagatcccgggggcataactgctggcagcaccgacgaacccccaatgctgaccaaggaggagcctgttccagaactgctggaagctgaggattcgggagtgagaatgacgaggagagcccttcacgagaaggggctgaagacagagcccctcaggaggctcctgcccaggaggggcctccggacaaatgtccggcccagttccatggcggtgccggacaccagagctcccgggggaggcagcaaggccccgagggcacccagaacaatcccccagggtaaggggaggtgagtgggctccccaagcaagccaagacccctaaagcctcccttggctgccccaagatccagccactacctgtgccccgagggcggaaagagcttcccagctcacccaccgcggtaacatcggagggcgagcggccccacacctgcccgaacctaaggccacagcacccatctggctcgccactggcgcccgaatgcatgggaagggcttagggcagaactcggaccacatccagtgcctgaggccgccttgctagaggcctaggggaggggtgcactgggctgcctcgcccacctcctcacgcacccatgcggccaccctcccagcggtctgagtgtgccatgcgaggcgcctgccaccccgggagaggcgccgagtcccgagtcctgccggcactgagcctccgggtccacagcgggcaagggccgtggcggggacaagcgcaggggacccgccggcctcccgccttctgcagcaccacgagatgcccacgtggcacctggacgtccatgcatatgttgaggcccgtgcacgcgcagagaccccagcgcagaagccgccccgcacgccagggcttatgtatgccagcgctgggagacctccagcgcccgaggacatacggcaagtggttccaccagggtgtcagcctagcaggccaacctgggaacccatgtggacaagcggcctttcagcccaggcgcccgcctcgggtggaggcgtggagacttctggcgcagccctgagctggtggcctaacctacctggaaaatcctagcccgagaagcagcgcgagtgagccttttgggtggttccaaggcccttcaccaagctctcacttcctgacttcaccgttgggtctgttgtactaggaaataataacgcctcccatttatcaagggtttactctgtaaaaa

SEQ ID NO: 165 - protein, 242 aa, Homo sapiens
MAGRTVRAETRSRAKDDIKKVMATIEKVRRWEKRWVTVGDTSLRIFKWVPVVDPQEEERRRAGGGAERSRGRERRGRGASPRGGGPLILLDLNDENSNQSFHSEGSLQKGTEPSPGGTPQPSRPVSPAGPPEGVPEEAQPPRLGQERDPGGITAGSTDEPPMLTKEEPVPELLEAEDSGVRMTRRALHEKGLKTEPLRRLLPRRGLRTNVRPSSMAVPDTRAPGGGSKAPRAPRTIPQGKGR

SEQ ID NO: 166 - DNA, 1101 bp, Homo sapiens
tccgtccccaactcgcgcgtccgtccccaactcccgctctcggcggcgggcagggggcgctgagcgtccaggcgctccaagggggcgggcccgggtcggggcggggccggccgggcttccaggcctgggctctggccgcccgcgccaccgggccgctccggggacaggccggggcggggcgcggcggcaggaaacggggcggggacttgcggaggcgttggggacgagagagggcgcggccaactccaggggggacggcaggccgagagcgcggcgcccgggcctggcgcggagcctgagcccgccggacgggaggcggccccgccgcgggctcggccccggccccagccccgccagcatggccggccggactgtacgggccgagacccggagccgggccaaggatgacatcaagaaggtgatggcgaccatcgagaaggtccggagatgggagaagcgatgggtgactgtgggcgacacttcccttcgtatcttcaagtgggtgccagtggtggatccccaggaggaggagcgaaggcgggcaggtggcggggcagagagatcccgtggccgggaacgtcggggcaggggcgccagtccccgagggggtggccctctcatcctgctggatcttaatgatgagaacagcaaccagagtttccattcggaaggttccctgcaaaagggcacagagcccagtcctgggggcaccccccagcccagccgccctgtgtcacctgccggacccccagaaggggtccctgaggaggctcagcccccacggctgggccaagagagagatcccgggggcataactgctggcagcaccgacgaacccccaatgctgaccaaggaggagcctgttccagaactgctggaagctgaggcccccgaagcttaccctgtctttgagccagtgccacctgtccctgaggcagcccagggtgacacagaggactcggagggtgcccccccactcaagcgcatctgcccaaatgcccctgacccctgagaagccggcctgcctgtcctgttgccccaggggcccctttggctttttacaaataaagacccttttgtaaaaaaaaaaaaaaaaaaaaa

SEQ ID NO: 167 - protein, 217 aa, Homo sapiens
MAGRTVRAETRSRAKDDIKKVMATIEKVRRWEKRWVTVGDTSLRIFKWVPVVDPQEEERRRAGGGAERSRGRERRGRGASPRGGGPLILLDLNDENSNQSFHSEGSLQKGTEPSPGGTPQPSRPVSPAGPPEGVPEEAQPPRLGQERDPGGITAGSTDEPPMLTKEEPVPELLEAEAPEAYPVFEPVPPVPEAAQGDTEDSEGAPPLKRICPNAPDP

SEQ ID NO: 168 - DNA, 6360 bp, Mus musculus
ggccggggctctagcagcccgcgccgcccgggccgctccggggacgggccggggcggggcgcggtcttaggaagccaggcggggacgcgcggaggcgttggggagcgagggagggcgcggccaactcccggagggacggcaggccgaaagagcggcgctggggcctggcgctcagcctgagatcgccggaccacaggccgccccgccacgggctctgtcccggccccagccccgccagcatggccggccggaccgtgcgggccgagacccggagccgggccaaagatgacatcaagaaggtgatggcgaccatcgagaaggtccggagatgggagaagcgctgggtgactgtgggagacacttcccttcgaatcttcaagtgggtgcctgtggtggatccccaggaggaggagaggcggcgggcaggaggcggggcagagagatcccgtggccgggagagacgtggtaggggcaccagtcccagagggggaggccccctcatcctactggatctcaatgatgagaacagcaaccagagtttccattctgaaggttcattgcaaaagggtgctgagcccagccctggggggacgccccagcccagccgccctggatcaccaactggacccccagaagtgattactgaagatactcagcccccacaattgggtcaggagagagatccaggggggacacctgcaggcggtactgatgaacccccaaagctgaccaaggaggagcctgttccagaattgctagaagctgaggattccggcgtgagactcaccaggagagcccttcaagagaaaggcctgaaaaccgagcccctcaggaggcttctccccaggagaggcctccggacaaattctcggccaacttccacggttccggaacccagagctcccggaagtgggagcaaggcccagagggcacccaggacgataccacaagggaaggggaggtgagcgggttccaccacacaaggggaggcccttaggtcttccttagctgcctcaagatccagtcatttacccacaccgtttaagggtggagagggctttggagctgggcacccgcagccagcaatggaggtcggcagccagctctctgcttgtccctgtccctaaattatggatccatcctgcttgctgtgggtccaaaactactgggccagagcaggtcccagacagggaatgtctggggacatctctaggtgatgcctagaagcaacttgaatacacaaaatggtggatcctatgccaacttggtcacctcctcacacacttagggcagccatccaccaaagggccaggcatggcccctggaggtgaccttcgacctttggaactacagtatctacactggtgaggggccctaccagcaagacttgagcagcgagcaacccctgaagcactgggcaaaaggtaatgccacagcttgtgaatggtgtgaagattcaattgcccgtgtgtagagacaccactccagcaagcacctggcagcctcacccgcttccacgagcctatggactctgggcctgctaattaacccttggctccagaagacatgtgccaaccagggtgccaaccttgcctcaggtcaatcgaggggtgcacatggcccagtgacctttcagaccaggccacagcctcctgccccaggaatggatggagacatgtggtccagcactgccaaatctacctggaaactacccactttgagaaactcatggcagatgagccatctgagtgattccaagggctttcatcaacctcttgcctccgacttgacaactcacttggccaggaggtagtgtctcctgtaccacagagagctaactgtactacatattgcaacttgtgggacttatttaatgcagcactcctgtcatagatcctgttactttcacattttacagatatagaaaacaagcaaccaggaggttaaagagcttgccccaagtcacacagcctgtctgtggcagagccagcattcacatccagtctacccacctgactccacagtccctgctagtgtaccactttttgtgctgggcatgcaggtgggctgcagctgtgagctttgttgaggcgttcattgaaggaacatccatttttctcagtggcaaattacaaaggacttttaattttaactttcttctgcctgacctaccttccttccttccttccttccttccttccttccttccttccttccttccttccttccttcctttcttcctctgctggccatgaacccactagaccaggccagtcttgaactcacagaggtctgtctatctctgcctctccagtgctgggattaaaggtgagcgacaccatacccagcttaggccttctttgtttgtttgtttgttgttttttgagtaataaggtaagcagatgttctgtgtccataactgagatgacatggacattgagtggtaagggacttgagctcagcccctgggtccctcagattcctctctggagtgccattgatacaggaagcatcatctaggcccagctcctgattggcgacttcccagaagccatgggctgtcatgccaagtgactggggaacttcaagtaacaaacatttattaattagacttctgaactaccaatggggcagaagttttcacgtttcaaacacagatactagttttcaagattcagaaatgaaacataggaattctggggaggtccagaaagtcctactttgtatttttcataactctctgtatcttaaaagctaagaaactcacagttcatcgtagtttaaaagagctgcaagccttaaatattcaaaaggtagaaactgccagtgtgtgtcactgggtagtagttgaataacaaaatgtttacggatccaattagattcatggtactccagagtcatgagttgaaatcgcggatataaagacttatttccaatgcatcatttctcagaacaccctgggatttgtataaaacacacgatgcatgtgaacgcattcatgtttatcttatttctgagaatcattctacaggcgggggagcacgcatacatttttaatgtcagggctacagaagactggcctggcacggctcccctcagttcttggttcccaaattctaaggatgtctgccttcgtttcatgtgtcagcctttcctgctctcggacctgacacagtggctccgtacagcgaggactcctctgtgctgatgaacttcggctgttagaggactgttagtatgtttcctgtttcgccaatttatttgctgattggttttgtgattcaaaaaacaaacaagcaagcaaacaaacaaaaacaaaagcagggaccaggcgtggtggcgcacgcctttaatcttggaggcagaggcaggcggatttctgagttcgaggccaacctgatctacaaagtgagttccaggacagccagggctatacagagaaaccctgtctcaaaaacaaacaaacaaaaacaaacaaaaaaacaaaagcagacaaaatcaccaccagcagcagcaacaatcccaggtttcccaataatgtcagcaaggaattctgaacagacaaagtccgtggggctgagcagggacggtgaataagtgagctcgtgtttatgaagcccagtgatctgctccttgcagccagaacgctccagctcagccaggccctggcacgagccctcggctgaagcactcacctctgagcttcagtttagtgagtagcatcctccctagaaagtaatattcttgcttcatacggtgatatggtggaagggttaccagcatggctttggagtcagacagactgtggttcaaatcttagctacacgactttctacctctttgatttggggcaagttctaaccgctggctttttctcttctgtaaaatgaggacatggaatctatttcacagggctgtggcttcagtgagatcacatatgacccgcttaagtcaaagcgggtccacggtatgtgtttgatcccacgtaggcattacccgctgtatctacctcacagggcagttgtgaggatgaagggtagagggaaatgctttccaaactgtgaagtgatctgtgtttacctctctcctctggagatggagagataggaagttgctgtcagacactagtgggatgcccatggagagggcctagtatgcttctgtgcacacagtgtggctgggctgaaggggaggtgctgtgttgtgcagtggtgcacagcgggggcgtgccctccggtgagggttgctgcactgaagtggggaagttcagtgcctatggctacactgttgggagcagggagagcgcaggtcctatcttaagaaggatgctagatgggggctaaagtagatgagtgtttgcctagcatgagcaagggccatggatttcgtatctagcacctcaggaaaaacacaacaaacaaacaaacaaacaaacccctcttcttgtttaaagattctggataaagaacagtgttgtgaacgtgtgtatccactgtttgtctttttaaatacaactcaaatagcaggaaggcctgtgtgcacaagaggtgacaagtgactgcaagtgtttccatcgctggcagccatgcaccctcctaccacgagtacagatttcattctggagtgtgcagaccaaatgcaggtcagagggccctcccggggcaactcgccaagatcctgaccaaagcctagcctcacaaagtaatccctagcccagttagcagatcaggggttggggcttgggaacgtcatgtccaatgtccaaggctgcacaggtcctgtggggacagaatccaagcccttcacctggattggggttcctccgcctgccagtctcagatctctgatcttgaacaaggatagcatgcagaagagtaaggttccatgcctaagtgacctcctctggacctcagacgcagttcttgctcctgacctcatgcctcgtctccagacatcactccccagcttagcccttaggtcaggctcctctgggcaccatccttagattcaacccaaaggagggtcctctcattctaaccagactgtctctccaaataccaccctagtcagctccttggcttctcagtgtccccttggagaacatggggtataggttcccagctagttcagtggcattccacagcccatctcttgtgaggtcccactccttaacaatggtctttcagtttcaaacgcatgcggccagcgggcagtctagggacccttcaaagtcaatgcttcttgattaaattatcgagactaatgtttaactttgagatacgttttctgagagttgctaaccggttggagatgaacttagagaatagggttcacctttttcgtctgtcagcgggttatcgagtgcccagtggtgtgccagattcagcagctggtgcaggagatacattcgtgagcaaaacagatctgagccctgacttcgggaggcctcctcctaacaactagggcagatataaccagtgttccctgaatacaaacgcctagcctggcatggtggcacacacctatgatgtcagcccttaggagccggaggtaagaagatcaggagttcagctatctttggccaacctgggctacataagaccgtgtcttaaaaaaaaaaaaaaaaatccaaacaaaatacacactataactgtgagaaatgttgtgaagagaaaggtccaaatgcagtgaaagagctcagtaaaaaaagtgtggggtgtgttaggacagtgacaacatgtgcccgtatgtggagaagagaatcctgggtaatgggaggagcttactgtattggaatcggcagcagcagtgaggtctgctgctggacggagcctgccccccaggctgggtggggaaggtgtcacggaccttgcagaccacggtaaggaacttgcattctggtgtttaactttttatttggagaccatttcaaagtgactggaaccttatgagagtggcacaaaagatgtctgcatactttggctgcagcctccccgactgacctgtaaacgttctgttccccgagtcaccacccgtgtctccctgtgatgtgtactcatagcctgtagtccgaactctgagaatgagttgcatacattgtgtctgtttacacttaaaacacagtggagaccccctacagtaatgcctcgcccgcctccgcctgccacactgggtttatcgctggttggtggctccacactgtttgttggtcgtctctctagtcaccttcattagcatcttccctttaggacaagtcacgtctgcgaatgatgtggaccatgcgttgtgctttcttgctcgtatcttttaatgtggcgtagtttctttcctctctgtttgaatagactatttctccttttg

SEQ ID NO: 169 - protein, 241 aa, Mus musculus
MAGRTVRAETRSRAKDDIKKVMATIEKVRRWEKRWVTVGDTSLRIFKWVPVVDPQEEERRRAGGGAERSRGRERRGRGTSPRGGGPLILLDLNDENSNQSFHSEGSLQKGAEPSPGGTPQPSRPGSPTGPPEVITEDTQPPQLGQERDPGGTPAGGTDEPPKLTKEEPVPELLEAEDSGVRLTRRALQEKGLKTEPLRRLLPRRGLRTNSRPTSTVPEPRAPGSGSKAQRAPRTIPQGKGR

SEQ ID NO: 170 - DNA, 981 bp, Mus musculus
ggccggggctctagcagcccgcgccgcccgggccgctccggggacgggccggggcggggcgcggtcttaggaagccaggcggggacgcgcggaggcgttggggagcgagggagggcgcggccaactcccggagggacggcaggccgaaagagcggcgctggggcctggcgctcagcctgagatcgccggaccacaggccgccccgccacgggctctgtcccggccccagccccgccagcatggccggccggaccgtgcgggccgagacccggagccgggccaaagatgacatcaagaaggtgatggcgaccatcgagaaggtccggagatgggagaagcgctgggtgactgtgggagacacttcccttcgaatcttcaagtgggtgcctgtggtggatccccaggaggaggagaggcggcgggcaggaggcggggcagagagatcccgtggccgggagagacgtggtaggggcaccagtcccagagggggaggccccctcatcctactggatctcaatgatgagaacagcaaccagagtttccattctgaaggttcattgcaaaagggtgctgagcccagccctggggggacgccccagcccagccgccctggatcaccaactggacccccagaagtgattactgaagatactcagcccccacaattgggtcaggagagagatccaggggggacacctgcaggcggtactgatgaacccccaaagctgaccaaggaggagcctgttccagaattgctagaagctgaggcccccgaagcttaccctgtctttgagccagtgccatctgtccctgaggcagcccagggtgacacagaggactcggagggcgcccccccactcaagcgcatctgtccaaatgcccctgacccctgagaagccgcctgcctcctgtcctgttgctccaggggcccctttggctttttataaataaagacccttttgtaaaaaaaaaaaaaaaaaa

SEQ ID NO: 171 - protein, 217 aa, Mus musculus
MAGRTVRAETRSRAKDDIKKVMATIEKVRRWEKRWVTVGDTSLRIFKWVPVVDPQEEERRRAGGGAERSRGRERRGRGTSPRGGGPLILLDLNDENSNQSFHSEGSLQKGAEPSPGGTPQPSRPGSPTGPPEVITEDTQPPQLGQERDPGGTPAGGTDEPPKLTKEEPVPELLEAEAPEAYPVFEPVPSVPEAAQGDTEDSEGAPPLKRICPNAPDP

SEQ ID NO: 172 - protein, 1590 aa, Homo sapiens
MSTPTDPGAMPHPGPSPGPGPSPGPILGPSPGPGPSPGSVHSMMGPSPGPPSVSHPMPTMGSTDFPQEGMHQMHKPIDGIHDKGIVEDIHCGSMKGTGMRPPHPGMGPPQSPMDQHSQGYMSPHPSPLGAPEHVSSPMSGGGPTPPQMPPSQPGALIPGDPQAMSQPNRGPSPFSPVQLHQLRAQILAYKMLARGQPLPETLQLAVQGKRTLPGLQQQQQQQQQQQQQQQQQQQQQQQPQQQPPQPQTQQQQQPALVNYNRPSGPGPELSGPSTPQKLPVPAPGGRPSPAPPAAAQPPAAAVPGPSVPQPAPGQPSPVLQLQQKQSRISPIQKPQGLDPVEILQEREYRLQARIAHRIQELENLPGSLPPDLRTKATVELKALRLLNFQRQLRQEVVACMRRDTTLETALNSKAYKRSKRQTLREARMTEKLEKQQKIEQERKRRQKHQEYLNSILQHAKDFKEYHRSVAGKIQKLSKAVATWHANTEREQKKETERIEKERMRRLMAEDEEGYRKLIDQKKDRRLAYLLQQTDEYVANLTNLVWEHKQAQAAKEKKKRRRRKKKAEENAEGGESALGPDGEPIDESSQMSDLPVKVTHTETGKVLFGPEAPKASQLDAWLEMNPGYEVAPRSDSEESDSDYEEEDEEEESSRQETEEKILLDPNSEEVSEKDAKQIIETAKQDVDDEYSMQYSARGSQSYYTVAHAISERVEKQSALLINGTLKHYQLQGLEWMVSLYNNNLNGILADEMGLGKTIQTIALITYLMEHKRLNGPYLIIVPLSTLSNWTYEFDKWAPSVVKISYKGTPAMRRSLVPQLRSGKFNVLLTTYEYIIKDKHILAKIRWKYMIVDEGHRMKNHHCKLTQVLNTHYVAPRRILLTGTPLQNKLPELWALLNFLLPTIFKSCSTFEQWFNAPFAMTGERVDLNEEETILIIRRLHKVLRPFLLRRLKKEVESQLPEKVEYVIKCDMSALQKILYRHMQAKGILLTDGSEKDKKGKGGAKTLMNTIMQLRKICNHPYMFQHIEESFAEHLGYSNGVINGAELYRASGKFELLDRILPKLRATNHRVLLFCQMTSLMTIMEDYFAFRNFLYLRLDGTTKSEDRAALLKKFNEPGSQYFIFLLSTRAGGLGLNLQAADTVVIFDSDWNPHQDLQAQDRAHRIGQQNEVRVLRLCTVNSVEEKILAAAKYKLNVDQKVIQAGMFDQKSSSHERRAFLQAILEHEEENEEEDEVPDDETLNQMIARREEEFDLFMRMDMDRRREDARNPKRKPRLMEEDELPSWIIKDDAEVERLTCEEEEEKIFGRGSRQRRDVDYSDALTEKQWLRAIEDGNLEEMEEEVRLKKRKRRRNVDKDPAKEDVEKAKKRRGRPPAEKLSPNPPKLTKQMNAIIDTVINYKDRCNVEKVPSNSQLEIEGNSSGRQLSEVFIQLPSRKELPEYYELIRKPVDFKKIKERIRNHKYRSLGDLEKDVMLLCHNAQTFNLEGSQIYEDSIVLQSVFKSARQKIAKEEESEDESNEEEEEEDEEESESEAKSVKVKIKLNKKDDKGRDKGKGKKRPNRGKAKPVVSDFDSDEEQDEREQSEGSGTDDE

SEQ ID NO: 173 - DNA, 5892 bp, Homo sapiens
gcgtcttccggcgcccgcggaggaggcgagggtgggacgctgggcggagcccgagtttaggaagaggaggggacggctgtcatcaatgaagtcatattcataatctagtcctctctccctctgtttctgtactctgggtgactcagagagggaagagattcagccagcacactcctcgcgagcaagcattactctactgactggcagagacaggagaggtagatgtccacgcccacagaccctggtgcgatgccccacccagggccttcgccggggcctgggccttcccctgggccaattcttgggcctagtccaggaccaggaccatccccaggttccgtccacagcatgatggggccaagtcctggacctccaagtgtctcccatcctatgccgacgatggggtccacagacttcccacaggaaggcatgcatcaaatgcataagcccatcgatggtatacatgacaaggggattgtagaagacatccattgtggatccatgaagggcactggtatgcgaccacctcacccaggcatgggccctccccagagtccaatggatcaacacagccaaggttatatgtcaccacacccatctccattaggagccccagagcacgtctccagccctatgtctggaggaggcccaactccacctcagatgccaccaagccagccgggggccctcatcccaggtgatccgcaggccatgagccagcccaacagaggtccctcacctttcagtcctgtccagctgcatcagcttcgagctcagattttagcttataaaatgctggcccgaggccagcccctccccgaaacgctgcagcttgcagtccaggggaaaaggacgttgcctggcttgcagcaacaacagcagcagcaacagcagcagcagcagcagcagcagcagcagcagcagcagcaacagcagccgcagcagcagccgccgcaaccacagacgcagcaacaacagcagccggcccttgttaactacaacagaccatctggcccggggccggagctgagcggcccgagcaccccgcagaagctgccggtgcccgcgcccggcggccggccctcgcccgcgccccccgcagccgcgcagccgcccgcggccgcagtgcccgggccctcagtgccgcagccggccccggggcagccctcgcccgtcctccagctgcagcagaagcagagccgcatcagccccatccagaaaccgcaaggcctggaccccgtggaaattctgcaagagcgggaatacagacttcaggcccgcatagctcataggatacaagaactggaaaatctgcctggctctttgccaccagatttaagaaccaaagcaaccgtggaactaaaagcacttcggttactcaatttccagcgtcagctgagacaggaggtggtggcctgcatgcgcagggacacgaccctggagacggctctcaactccaaagcatacaaacggagcaagcgccagactctgagagaagctcgcatgaccgagaagctggagaagcagcagaagattgagcaggagaggaaacgccgtcagaaacaccaggaatacctgaacagtattttgcaacatgcaaaagattttaaggaatatcatcggtctgtggccggaaagatccagaagctctccaaagcagtggcaacttggcatgccaacactgaaagagagcagaagaaggagacagagcggattgaaaaggagagaatgcggcgactgatggctgaagatgaggagggttatagaaaactgattgatcaaaagaaagacaggcgtttagcttaccttttgcagcagaccgatgagtatgtagccaatctgaccaatctggtttgggagcacaagcaagcccaggcagccaaagagaagaagaagaggaggaggaggaagaagaaggctgaggagaatgcagagggtggggagtctgccctgggaccggatggagagcccatagatgagagcagccagatgagtgacctccctgtcaaagtgactcacacagaaaccggcaaggttctgttcggaccagaagcacccaaagcaagtcagctggacgcctggctggaaatgaatcctggttatgaagttgcccctagatctgacagtgaagagagtgattctgattatgaggaagaggatgaggaagaagagtccagtaggcaggaaaccgaagagaaaatactcctggatccaaatagcgaagaagtttctgagaaggatgctaagcagatcattgagacagctaagcaagacgtggatgatgaatacagcatgcagtacagtgccaggggctcccagtcctactacaccgtggctcatgccatctcggagagggtggagaaacagtctgccctcctaattaatgggaccctaaagcattaccagctccagggcctggaatggatggtttccctgtataataacaacttgaacggaatcttagccgatgaaatggggcttggaaagaccatacagaccattgcactcatcacttatctgatggagcacaaaagactcaatggcccctatctcatcattgttcccctttcgactctatctaactggacatatgaatttgacaaatgggctccttctgtggtgaagatttcttacaagggtactcctgccatgcgtcgctcccttgtcccccagctacggagtggcaaattcaatgtcctcttgactacttatgagtatattataaaagacaagcacattcttgcaaagattcggtggaaatacatgatagtggacgaaggccaccgaatgaagaatcaccactgcaagctgactcaggtcttgaacactcactatgtggcccccagaaggatcctcttgactgggaccccgctgcagaataagctccctgaactctgggccctcctcaacttcctcctcccaacaatttttaagagctgcagcacatttgaacaatggttcaatgctccatttgccatgactggtgaaagggtggacttaaatgaagaagaaactatattgatcatcaggcgtctacataaggtgttaagaccatttttactaaggagactgaagaaagaagttgaatcccagcttcccgaaaaagtggaatatgtgatcaagtgtgacatgtcagctctgcagaagattctgtatcgccatatgcaagccaaggggatccttctcacagatggttctgagaaagataagaaggggaaaggaggtgctaagacacttatgaacactattatgcagttgagaaaaatctgcaaccacccatatatgtttcagcacattgaggaatcctttgctgaacacctaggctattcaaatggggtcatcaatggggctgaactgtatcgggcctcagggaagtttgagctgcttgatcgtattctgccaaaattgagagcgactaatcaccgagtgctgcttttctgccagatgacatctctcatgaccatcatggaggattattttgcttttcggaacttcctttacctacgccttgatggcaccaccaagtctgaagatcgtgctgctttgctgaagaaattcaatgaacctggatcccagtatttcattttcttgctgagcacaagagctggtggcctgggcttaaatcttcaggcagctgatacagtggtcatctttgacagcgactggaatcctcatcaggatctgcaggcccaagaccgagctcaccgcatcgggcagcagaacgaggtccgggtactgaggctctgtaccgtgaacagcgtggaggaaaagatcctcgcggccgcaaaatacaagctgaacgtggatcagaaagtgatccaggcgggcatgtttgaccaaaagtcttcaagccacgagcggagggcattcctgcaggccatcttggagcatgaggaggaaaatgaggaagaagatgaagtaccggacgatgagactctgaaccaaatgattgctcgacgagaagaagaatttgacctttttatgcggatggacatggaccggcggagggaagatgcccggaacccgaaacggaagccccgtttaatggaggaggatgagctgccctcctggatcattaaggatgacgctgaagtagaaaggctcacctgtgaagaagaggaggagaaaatatttgggagggggtcccgccagcgccgtgacgtggactacagtgacgccctcacggagaagcagtggctaagggccatcgaagacggcaatttggaggaaatggaagaggaagtacggcttaagaagcgaaaaagacgaagaaatgtggataaagatcctgcaaaagaagatgtggaaaaagctaagaagagaagaggccgccctcccgctgagaaactgtcaccaaatccccccaaactgacaaagcagatgaacgctatcatcgatactgtgataaactacaaagataggtgtaacgtggagaaggtgcccagtaattctcagttggaaatagaaggaaacagttcagggcgacagctcagtgaagtcttcattcagttaccttcaaggaaagaattaccagaatactatgaattaattaggaagccagtggatttcaaaaaaataaaggaaaggattcgtaatcataagtaccggagcctaggcgacctggagaaggatgtcatgcttctctgtcacaacgctcagacgttcaacctggagggatcccagatctatgaagactccatcgtcttacagtcagtgtttaagagtgcccggcagaaaattgccaaagaggaagagagtgaggatgaaagcaatgaagaggaggaagaggaagatgaagaagagtcagagtccgaggcaaaatcagtcaaggtgaaaattaagctcaataaaaaagatgacaaaggccgggacaaagggaaaggcaagaaaaggccaaatcgaggaaaagccaaacctgtagtgagcgattttgacagcgatgaggagcaggatgaacgtgaacagtcagaaggaagtgggacggatgatgagtgatcagtatggacctttttccttggtagaactgaattccttcctcccctgtctcatttctacccagtgagttcatttgtcatataggcactgggttgtttctatatcatcatcgtctataaactagctttaggatagtgccagacaaacatatgatatcatggtgtaaaaaacacacacatacacaaatatttgtaacatattgtgaccaaatgggcctcaaagattcagattgaaacaaacaaaaagcttttgatggaaaatatgtgggtggatagtatatttctatgggtgggtctaatttggtaacggtttgattgtgcctggttttatcacctgttcagatgagaagatttttgtcttttgtagcactgataaccaggagaagccattaaaagccactggttattttatttttcatcaggcaattttcgaggtttttatttgttcggtattgtttttttacactgtggtacatataagcaactttaataggtgataaatgtacagtagttagatttcacctgcatatacatttttccattttatgctctatgatctgaacaaaagctttttgaattgtataagatttatgtctactgtaaacattgcttaatttttttgctcttgatttaaaaaaaagttttgttgaaagcgctattgaatattgcaatctatatagtgtattggatggcttcttttgtcaccctgatctcctatgttaccaatgtgtatcgtctccttctccctaaagtgtacttaatctttgctttctttgcacaatgtctttggttgcaagtcataagcctgaggcaaataaaattccagtaatttcgaagaatgtggtgttggtgctttcctaataaagaaataatttagcttgacaaaaaaaaaaaaaaa

SEQ ID NO: 174 - DNA, 5879 bp, Homo sapiens
tcagaagaaagccccgagatcacagagacccggcgagatcacagagacccggcctgaaggaacgtggaaagaccaatgtacctgttttgaccggttgcctggagcaagaagttccagttggggagaattttcagaagataaagtcggagattgtggaaagacttgacttgcagcattactctactgactggcagagacaggagaggtagatgtccacgcccacagaccctggtgcgatgccccacccagggccttcgccggggcctgggccttcccctgggccaattcttgggcctagtccaggaccaggaccatccccaggttccgtccacagcatgatggggccaagtcctggacctccaagtgtctcccatcctatgccgacgatggggtccacagacttcccacaggaaggcatgcatcaaatgcataagcccatcgatggtatacatgacaaggggattgtagaagacatccattgtggatccatgaagggcactggtatgcgaccacctcacccaggcatgggccctccccagagtccaatggatcaacacagccaaggttatatgtcaccacacccatctccattaggagccccagagcacgtctccagccctatgtctggaggaggcccaactccacctcagatgccaccaagccagccgggggccctcatcccaggtgatccgcaggccatgagccagcccaacagaggtccctcacctttcagtcctgtccagctgcatcagcttcgagctcagattttagcttataaaatgctggcccgaggccagcccctccccgaaacgctgcagcttgcagtccaggggaaaaggacgttgcctggcttgcagcaacaacagcagcagcaacagcagcagcagcagcagcagcagcagcagcagcagcagcaacagcagccgcagcagcagccgccgcaaccacagacgcagcaacaacagcagccggcccttgttaactacaacagaccatctggcccggggccggagctgagcggcccgagcaccccgcagaagctgccggtgcccgcgcccggcggccggccctcgcccgcgccccccgcagccgcgcagccgcccgcggccgcagtgcccgggccctcagtgccgcagccggccccggggcagccctcgcccgtcctccagctgcagcagaagcagagccgcatcagccccatccagaaaccgcaaggcctggaccccgtggaaattctgcaagagcgggaatacagacttcaggcccgcatagctcataggatacaagaactggaaaatctgcctggctctttgccaccagatttaagaaccaaagcaaccgtggaactaaaagcacttcggttactcaatttccagcgtcagctgagacaggaggtggtggcctgcatgcgcagggacacgaccctggagacggctctcaactccaaagcatacaaacggagcaagcgccagactctgagagaagctcgcatgaccgagaagctggagaagcagcagaagattgagcaggagaggaaacgccgtcagaaacaccaggaatacctgaacagtattttgcaacatgcaaaagattttaaggaatatcatcggtctgtggccggaaagatccagaagctctccaaagcagtggcaacttggcatgccaacactgaaagagagcagaagaaggagacagagcggattgaaaaggagagaatgcggcgactgatggctgaagatgaggagggttatagaaaactgattgatcaaaagaaagacaggcgtttagcttaccttttgcagcagaccgatgagtatgtagccaatctgaccaatctggtttgggagcacaagcaagcccaggcagccaaagagaagaagaagaggaggaggaggaagaagaaggctgaggagaatgcagagggtggggagtctgccctgggaccggatggagagcccatagatgagagcagccagatgagtgacctccctgtcaaagtgactcacacagaaaccggcaaggttctgttcggaccagaagcacccaaagcaagtcagctggacgcctggctggaaatgaatcctggttatgaagttgcccctagatctgacagtgaagagagtgattctgattatgaggaagaggatgaggaagaagagtccagtaggcaggaaaccgaagagaaaatactcctggatccaaatagcgaagaagtttctgagaaggatgctaagcagatcattgagacagctaagcaagacgtggatgatgaatacagcatgcagtacagtgccaggggctcccagtcctactacaccgtggctcatgccatctcggagagggtggagaaacagtctgccctcctaattaatgggaccctaaagcattaccagctccagggcctggaatggatggtttccctgtataataacaacttgaacggaatcttagccgatgaaatggggcttggaaagaccatacagaccattgcactcatcacttatctgatggagcacaaaagactcaatggcccctatctcatcattgttcccctttcgactctatctaactggacatatgaatttgacaaatgggctccttctgtggtgaagatttcttacaagggtactcctgccatgcgtcgctcccttgtcccccagctacggagtggcaaattcaatgtcctcttgactacttatgagtatattataaaagacaagcacattcttgcaaagattcggtggaaatacatgatagtggacgaaggccaccgaatgaagaatcaccactgcaagctgactcaggtcttgaacactcactatgtggcccccagaaggatcctcttgactgggaccccgctgcagaataagctccctgaactctgggccctcctcaacttcctcctcccaacaatttttaagagctgcagcacatttgaacaatggttcaatgctccatttgccatgactggtgaaagggtggacttaaatgaagaagaaactatattgatcatcaggcgtctacataaggtgttaagaccatttttactaaggagactgaagaaagaagttgaatcccagcttcccgaaaaagtggaatatgtgatcaagtgtgacatgtcagctctgcagaagattctgtatcgccatatgcaagccaaggggatccttctcacagatggttctgagaaagataagaaggggaaaggaggtgctaagacacttatgaacactattatgcagttgagaaaaatctgcaaccacccatatatgtttcagcacattgaggaatcctttgctgaacacctaggctattcaaatggggtcatcaatggggctgaactgtatcgggcctcagggaagtttgagctgcttgatcgtattctgccaaaattgagagcgactaatcaccgagtgctgcttttctgccagatgacatctctcatgaccatcatggaggattattttgcttttcggaacttcctttacctacgccttgatggcaccaccaagtctgaagatcgtgctgctttgctgaagaaattcaatgaacctggatcccagtatttcattttcttgctgagcacaagagctggtggcctgggcttaaatcttcaggcagctgatacagtggtcatctttgacagcgactggaatcctcatcaggatctgcaggcccaagaccgagctcaccgcatcgggcagcagaacgaggtccgggtactgaggctctgtaccgtgaacagcgtggaggaaaagatcctcgcggccgcaaaatacaagctgaacgtggatcagaaagtgatccaggcgggcatgtttgaccaaaagtcttcaagccacgagcggagggcattcctgcaggccatcttggagcatgaggaggaaaatgaggaagaagatgaagtaccggacgatgagactctgaaccaaatgattgctcgacgagaagaagaatttgacctttttatgcggatggacatggaccggcggagggaagatgcccggaacccgaaacggaagccccgtttaatggaggaggatgagctgccctcctggatcattaaggatgacgctgaagtagaaaggctcacctgtgaagaagaggaggagaaaatatttgggagggggtcccgccagcgccgtgacgtggactacagtgacgccctcacggagaagcagtggctaagggccatcgaagacggcaatttggaggaaatggaagaggaagtacggcttaagaagcgaaaaagacgaagaaatgtggataaagatcctgcaaaagaagatgtggaaaaagctaagaagagaagaggccgccctcccgctgagaaactgtcaccaaatccccccaaactgacaaagcagatgaacgctatcatcgatactgtgataaactacaaagataggtgtaacgtggagaaggtgcccagtaattctcagttggaaatagaaggaaacagttcagggcgacagctcagtgaagtcttcattcagttaccttcaaggaaagaattaccagaatactatgaattaattaggaagccagtggatttcaaaaaaataaaggaaaggattcgtaatcataagtaccggagcctaggcgacctggagaaggatgtcatgcttctctgtcacaacgctcagacgttcaacctggagggatcccagatctatgaagactccatcgtcttacagtcagtgtttaagagtgcccggcagaaaattgccaaagaggaagagagtgaggatgaaagcaatgaagaggaggaagaggaagatgaagaagagtcagagtccgaggcaaaatcagtcaaggtgaaaattaagctcaataaaaaagatgacaaaggccgggacaaagggaaaggcaagaaaaggccaaatcgaggaaaagccaaacctgtagtgagcgattttgacagcgatgaggagcaggatgaacgtgaacagtcagaaggaagtgggacggatgatgagtgatcagtatggacctttttccttggtagaactgaattccttcctcccctgtctcatttctacccagtgagttcatttgtcatataggcactgggttgtttctatatcatcatcgtctataaactagctttaggatagtgccagacaaacatatgatatcatggtgtaaaaaacacacacatacacaaatatttgtaacatattgtgaccaaatgggcctcaaagattcagattgaaacaaacaaaaagcttttgatggaaaatatgtgggtggatagtatatttctatgggtgggtctaatttggtaacggtttgattgtgcctggttttatcacctgttcagatgagaagatttttgtcttttgtagcactgataaccaggagaagccattaaaagccactggttattttatttttcatcaggcaattttcgaggtttttatttgttcggtattgtttttttacactgtggtacatataagcaactttaataggtgataaatgtacagtagttagatttcacctgcatatacatttttccattttatgctctatgatctgaacaaaagctttttgaattgtataagatttatgtctactgtaaacattgcttaatttttttgctcttgatttaaaaaaaagttttgttgaaagcgctattgaatattgcaatctatatagtgtattggatggcttcttttgtcaccctgatctcctatgttaccaatgtgtatcgtctccttctccctaaagtgtacttaatctttgctttctttgcacaatgtctttggttgcaagtcataagcctgaggcaaataaaattccagtaatttcgaagaatgtggtgttggtgctttcctaataaagaaataatttagcttgacaaaaaaaaaaaaaaa

SEQ ID NO: 175 - protein, 1572 aa, Homo sapiens
MSTPTDPGAMPHPGPSPGPGPSPGPILGPSPGPGPSPGSVHSMMGPSPGPPSVSHPMPTMGSTDFPQEGMHQMHKPIDGIHDKGIVEDIHCGSMKGTGMRPPHPGMGPPQSPMDQHSQGYMSPHPSPLGAPEHVSSPMSGGGPTPPQMPPSQPGALIPGDPQAMSQPNRGPSPFSPVQLHQLRAQILAYKMLARGQPLPETLQLAVQGKRTLPGLQQQQQQQQQQQQQQQQQQQQQQQPQQQPPQPQTQQQQQPALVNYNRPSGPGPELSGPSTPQKLPVPAPGGRPSPAPPAAAQPPAAAVPGPSVPQPAPGQPSPVLQLQQKQSRISPIQKPQGLDPVEILQEREYRLQARIAHRIQELENLPGSLPPDLRTKATVELKALRLLNFQRQLRQEVVACMRRDTTLETALNSKAYKRSKRQTLREARMTEKLEKQQKIEQERKRRQKHQEYLNSILQHAKDFKEYHRSVAGKIQKLSKAVATWHANTEREQKKETERIEKERMRRLMAEDEEGYRKLIDQKKDRRLAYLLQQTDEYVANLTNLVWEHKQAQAAKEKKKRRRRKKKAEENAEGGESALGPDGEPIDESSQMSDLPVKVTHTETGKVLFGPEAPKASQLDAWLEMNPGYEVAPRSDSEESDSDYEEEDEEEESSRQETEEKILLDPNSEEVSEKDAKQIIETAKQDVDDEYSMQYSARGSQSYYTVAHAISERVEKQSALLINGTLKHYQLQGLEWMVSLYNNNLNGILADEMGLGKTIQTIALITYLMEHKRLNGPYLIIVPLSTLSNWTYEFDKWAPSVVKISYKGTPAMRRSLVPQLRSGKFNVLLTTYEYIIKDKHILAKIRWKYMIVDEGHRMKNHHCKLTQVLNTHYVAPRRILLTGTPLQNKLPELWALLNFLLPTIFKSCSTFEQWFNAPFAMTGERVDLNEEETILIIRRLHKVLRPFLLRRLKKEVESQLPEKVEYVIKCDMSALQKILYRHMQAKGILLTDGSEKDKKGKGGAKTLMNTIMQLRKICNHPYMFQHIEESFAEHLGYSNGVINGAELYRASGKFELLDRILPKLRATNHRVLLFCQMTSLMTIMEDYFAFRNFLYLRLDGTTKSEDRAALLKKFNEPGSQYFIFLLSTRAGGLGLNLQAADTVVIFDSDWNPHQDLQAQDRAHRIGQQNEVRVLRLCTVNSVEEKILAAAKYKLNVDQKVIQAGMFDQKSSSHERRAFLQAILEHEEENEEEDEVPDDETLNQMIARREEEFDLFMRMDMDRRREDARNPKRKPRLMEEDELPSWIIKDDAEVERLTCEEEEEKIFGRGSRQRRDVDYSDALTEKQWLRAIEDGNLEEMEEEVRLKKRKRRRNVDKDPAKEDVEKAKKRRGRPPAEKLSPNPPKLTKQMNAIIDTVINYKDSSGRQLSEVFIQLPSRKELPEYYELIRKPVDFKKIKERIRNHKYRSLGDLEKDVMLLCHNAQTFNLEGSQIYEDSIVLQSVFKSARQKIAKEEESEDESNEEEEEEDEEESESEAKSVKVKIKLNKKDDKGRDKGKGKKRPNRGKAKPVVSDFDSDEEQDEREQSEGSGTDDE

SEQ ID NO: 176 - DNA, 5838 bp, Homo sapiens
gcgtcttccggcgcccgcggaggaggcgagggtgggacgctgggcggagcccgagtttaggaagaggaggggacggctgtcatcaatgaagtcatattcataatctagtcctctctccctctgtttctgtactctgggtgactcagagagggaagagattcagccagcacactcctcgcgagcaagcattactctactgactggcagagacaggagaggtagatgtccacgcccacagaccctggtgcgatgccccacccagggccttcgccggggcctgggccttcccctgggccaattcttgggcctagtccaggaccaggaccatccccaggttccgtccacagcatgatggggccaagtcctggacctccaagtgtctcccatcctatgccgacgatggggtccacagacttcccacaggaaggcatgcatcaaatgcataagcccatcgatggtatacatgacaaggggattgtagaagacatccattgtggatccatgaagggcactggtatgcgaccacctcacccaggcatgggccctccccagagtccaatggatcaacacagccaaggttatatgtcaccacacccatctccattaggagccccagagcacgtctccagccctatgtctggaggaggcccaactccacctcagatgccaccaagccagccgggggccctcatcccaggtgatccgcaggccatgagccagcccaacagaggtccctcacctttcagtcctgtccagctgcatcagcttcgagctcagattttagcttataaaatgctggcccgaggccagcccctccccgaaacgctgcagcttgcagtccaggggaaaaggacgttgcctggcttgcagcaacaacagcagcagcaacagcagcagcagcagcagcagcagcagcagcagcagcagcaacagcagccgcagcagcagccgccgcaaccacagacgcagcaacaacagcagccggcccttgttaactacaacagaccatctggcccggggccggagctgagcggcccgagcaccccgcagaagctgccggtgcccgcgcccggcggccggccctcgcccgcgccccccgcagccgcgcagccgcccgcggccgcagtgcccgggccctcagtgccgcagccggccccggggcagccctcgcccgtcctccagctgcagcagaagcagagccgcatcagccccatccagaaaccgcaaggcctggaccccgtggaaattctgcaagagcgggaatacagacttcaggcccgcatagctcataggatacaagaactggaaaatctgcctggctctttgccaccagatttaagaaccaaagcaaccgtggaactaaaagcacttcggttactcaatttccagcgtcagctgagacaggaggtggtggcctgcatgcgcagggacacgaccctggagacggctctcaactccaaagcatacaaacggagcaagcgccagactctgagagaagctcgcatgaccgagaagctggagaagcagcagaagattgagcaggagaggaaacgccgtcagaaacaccaggaatacctgaacagtattttgcaacatgcaaaagattttaaggaatatcatcggtctgtggccggaaagatccagaagctctccaaagcagtggcaacttggcatgccaacactgaaagagagcagaagaaggagacagagcggattgaaaaggagagaatgcggcgactgatggctgaagatgaggagggttatagaaaactgattgatcaaaagaaagacaggcgtttagcttaccttttgcagcagaccgatgagtatgtagccaatctgaccaatctggtttgggagcacaagcaagcccaggcagccaaagagaagaagaagaggaggaggaggaagaagaaggctgaggagaatgcagagggtggggagtctgccctgggaccggatggagagcccatagatgagagcagccagatgagtgacctccctgtcaaagtgactcacacagaaaccggcaaggttctgttcggaccagaagcacccaaagcaagtcagctggacgcctggctggaaatgaatcctggttatgaagttgcccctagatctgacagtgaagagagtgattctgattatgaggaagaggatgaggaagaagagtccagtaggcaggaaaccgaagagaaaatactcctggatccaaatagcgaagaagtttctgagaaggatgctaagcagatcattgagacagctaagcaagacgtggatgatgaatacagcatgcagtacagtgccaggggctcccagtcctactacaccgtggctcatgccatctcggagagggtggagaaacagtctgccctcctaattaatgggaccctaaagcattaccagctccagggcctggaatggatggtttccctgtataataacaacttgaacggaatcttagccgatgaaatggggcttggaaagaccatacagaccattgcactcatcacttatctgatggagcacaaaagactcaatggcccctatctcatcattgttcccctttcgactctatctaactggacatatgaatttgacaaatgggctccttctgtggtgaagatttcttacaagggtactcctgccatgcgtcgctcccttgtcccccagctacggagtggcaaattcaatgtcctcttgactacttatgagtatattataaaagacaagcacattcttgcaaagattcggtggaaatacatgatagtggacgaaggccaccgaatgaagaatcaccactgcaagctgactcaggtcttgaacactcactatgtggcccccagaaggatcctcttgactgggaccccgctgcagaataagctccctgaactctgggccctcctcaacttcctcctcccaacaatttttaagagctgcagcacatttgaacaatggttcaatgctccatttgccatgactggtgaaagggtggacttaaatgaagaagaaactatattgatcatcaggcgtctacataaggtgttaagaccatttttactaaggagactgaagaaagaagttgaatcccagcttcccgaaaaagtggaatatgtgatcaagtgtgacatgtcagctctgcagaagattctgtatcgccatatgcaagccaaggggatccttctcacagatggttctgagaaagataagaaggggaaaggaggtgctaagacacttatgaacactattatgcagttgagaaaaatctgcaaccacccatatatgtttcagcacattgaggaatcctttgctgaacacctaggctattcaaatggggtcatcaatggggctgaactgtatcgggcctcagggaagtttgagctgcttgatcgtattctgccaaaattgagagcgactaatcaccgagtgctgcttttctgccagatgacatctctcatgaccatcatggaggattattttgcttttcggaacttcctttacctacgccttgatggcaccaccaagtctgaagatcgtgctgctttgctgaagaaattcaatgaacctggatcccagtatttcattttcttgctgagcacaagagctggtggcctgggcttaaatcttcaggcagctgatacagtggtcatctttgacagcgactggaatcctcatcaggatctgcaggcccaagaccgagctcaccgcatcgggcagcagaacgaggtccgggtactgaggctctgtaccgtgaacagcgtggaggaaaagatcctcgcggccgcaaaatacaagctgaacgtggatcagaaagtgatccaggcgggcatgtttgaccaaaagtcttcaagccacgagcggagggcattcctgcaggccatcttggagcatgaggaggaaaatgaggaagaagatgaagtaccggacgatgagactctgaaccaaatgattgctcgacgagaagaagaatttgacctttttatgcggatggacatggaccggcggagggaagatgcccggaacccgaaacggaagccccgtttaatggaggaggatgagctgccctcctggatcattaaggatgacgctgaagtagaaaggctcacctgtgaagaagaggaggagaaaatatttgggagggggtcccgccagcgccgtgacgtggactacagtgacgccctcacggagaagcagtggctaagggccatcgaagacggcaatttggaggaaatggaagaggaagtacggcttaagaagcgaaaaagacgaagaaatgtggataaagatcctgcaaaagaagatgtggaaaaagctaagaagagaagaggccgccctcccgctgagaaactgtcaccaaatccccccaaactgacaaagcagatgaacgctatcatcgatactgtgataaactacaaagatagttcagggcgacagctcagtgaagtcttcattcagttaccttcaaggaaagaattaccagaatactatgaattaattaggaagccagtggatttcaaaaaaataaaggaaaggattcgtaatcataagtaccggagcctaggcgacctggagaaggatgtcatgcttctctgtcacaacgctcagacgttcaacctggagggatcccagatctatgaagactccatcgtcttacagtcagtgtttaagagtgcccggcagaaaattgccaaagaggaagagagtgaggatgaaagcaatgaagaggaggaagaggaagatgaagaagagtcagagtccgaggcaaaatcagtcaaggtgaaaattaagctcaataaaaaagatgacaaaggccgggacaaagggaaaggcaagaaaaggccaaatcgaggaaaagccaaacctgtagtgagcgattttgacagcgatgaggagcaggatgaacgtgaacagtcagaaggaagtgggacggatgatgagtgatcagtatggacctttttccttggtagaactgaattccttcctcccctgtctcatttctacccagtgagttcatttgtcatataggcactgggttgtttctatatcatcatcgtctataaactagctttaggatagtgccagacaaacatatgatatcatggtgtaaaaaacacacacatacacaaatatttgtaacatattgtgaccaaatgggcctcaaagattcagattgaaacaaacaaaaagcttttgatggaaaatatgtgggtggatagtatatttctatgggtgggtctaatttggtaacggtttgattgtgcctggttttatcacctgttcagatgagaagatttttgtcttttgtagcactgataaccaggagaagccattaaaagccactggttattttatttttcatcaggcaattttcgaggtttttatttgttcggtattgtttttttacactgtggtacatataagcaactttaataggtgataaatgtacagtagttagatttcacctgcatatacatttttccattttatgctctatgatctgaacaaaagctttttgaattgtataagatttatgtctactgtaaacattgcttaatttttttgctcttgatttaaaaaaaagttttgttgaaagcgctattgaatattgcaatctatatagtgtattggatggcttcttttgtcaccctgatctcctatgttaccaatgtgtatcgtctccttctccctaaagtgtacttaatctttgctttctttgcacaatgtctttggttgcaagtcataagcctgaggcaaataaaattccagtaatttcgaagaatgtggtgttggtgctttcctaataaagaaataatttagcttgacaaaaaaaaaaaaaaa

SEQ ID NO: 177 - protein, 1514 aa, Homo sapiens
MSTPTDPGAMPHPGPSPGPGPSPGPILGPSPGPGPSPGSVHSMMGPSPGPPSVSHPMPTMGSTDFPQEGMHQMHKPIDGIHDKGIVEDIHCGSMKGTGMRPPHPGMGPPQSPMDQHSQGYMSPHPSPLGAPEHVSSPMSGGGPTPPQMPPSQPGALIPGDPQAMSQPNRGPSPFSPVQLHQLRAQILAYKMLARGQPLPETLQLAVQGKRTLPGLQQQQQQQQQQQQQQQQQQQQQQQPQQQPPQPQTQQQQQPALVNYNRPSGPGPELSGPSTPQKLPVPAPGGRPSPAPPAAAQPPAAAVPGPSVPQPAPGQPSPVLQLQQKQSRISPIQKPQGLDPVEILQEREYRLQARIAHRIQELENLPGSLPPDLRTKATVELKALRLLNFQRQLRQEVVACMRRDTTLETALNSKAYKRSKRQTLREARMTEKLEKQQKIEQERKRRQKHQEYLNSILQHAKDFKEYHRSVAGKIQKLSKAVATWHANTEREQKKETERIEKERMRRLMAEDEEGYRKLIDQKKDRRLAYLLQQTDEYVANLTNLVWEHKQAQAAKEKKKRRRRKKKAEENAEGGESALGPDGEPIDESSQMSDLPVKVTHTETGKVLFGPEAPKASQLDAWLEMNPGYEVAPRSDSEESDSDYEEEDEEEESSRQETEEKILLDPNSEEVSEKDAKQIIETAKQDVDDEYSMQYSARGSQSYYTVAHAISERVEKQSALLINGTLKHYQLQGLEWMVSLYNNNLNGILADEMGLGKTIQTIALITYLMEHKRLNGPYLIIVPLSTLSNWTYEFDKWAPSVVKISYKGTPAMRRSLVPQLRSGKFNVLLTTYEYIIKDKHILAKIRWKYMIVDEGHRMKNHHCKLTQVDLNEEETILIIRRLHKVLRPFLLRRLKKEVESQLPEKVEYVIKCDMSALQKILYRHMQAKGILLTDGSEKDKKGKGGAKTLMNTIMQLRKICNHPYMFQHIEESFAEHLGYSNGVINGAELYRASGKFELLDRILPKLRATNHRVLLFCQMTSLMTIMEDYFAFRNFLYLRLDGTTKSEDRAALLKKFNEPGSQYFIFLLSTRAGGLGLNLQAADTVVIFDSDWNPHQDLQAQDRAHRIGQQNEVRVLRLCTVNSVEEKILAAAKYKLNVDQKVIQAGMFDQKSSSHERRAFLQAILEHEEENEEEDEVPDDETLNQMIARREEEFDLFMRMDMDRRREDARNPKRKPRLMEEDELPSWIIKDDAEVERLTCEEEEEKIFGRGSRQRRDVDYSDALTEKQWLRAIEDGNLEEMEEEVRLKKRKRRRNVDKDPAKEDVEKAKKRRGRPPAEKLSPNPPKLTKQMNAIIDTVINYKDSSGRQLSEVFIQLPSRKELPEYYELIRKPVDFKKIKERIRNHKYRSLGDLEKDVMLLCHNAQTFNLEGSQIYEDSIVLQSVFKSARQKIAKEEESEDESNEEEEEEDEEESESEAKSVKVKIKLNKKDDKGRDKGKGKKRPNRGKAKPVVSDFDSDEEQDEREQSEGSGTDDE

SEQ ID NO: 178 - DNA, 5664 bp, Homo sapiens
gcgtcttccggcgcccgcggaggaggcgagggtgggacgctgggcggagcccgagtttaggaagaggaggggacggctgtcatcaatgaagtcatattcataatctagtcctctctccctctgtttctgtactctgggtgactcagagagggaagagattcagccagcacactcctcgcgagcaagcattactctactgactggcagagacaggagaggtagatgtccacgcccacagaccctggtgcgatgccccacccagggccttcgccggggcctgggccttcccctgggccaattcttgggcctagtccaggaccaggaccatccccaggttccgtccacagcatgatggggccaagtcctggacctccaagtgtctcccatcctatgccgacgatggggtccacagacttcccacaggaaggcatgcatcaaatgcataagcccatcgatggtatacatgacaaggggattgtagaagacatccattgtggatccatgaagggcactggtatgcgaccacctcacccaggcatgggccctccccagagtccaatggatcaacacagccaaggttatatgtcaccacacccatctccattaggagccccagagcacgtctccagccctatgtctggaggaggcccaactccacctcagatgccaccaagccagccgggggccctcatcccaggtgatccgcaggccatgagccagcccaacagaggtccctcacctttcagtcctgtccagctgcatcagcttcgagctcagattttagcttataaaatgctggcccgaggccagcccctccccgaaacgctgcagcttgcagtccaggggaaaaggacgttgcctggcttgcagcaacaacagcagcagcaacagcagcagcagcagcagcagcagcagcagcagcagcagcaacagcagccgcagcagcagccgccgcaaccacagacgcagcaacaacagcagccggcccttgttaactacaacagaccatctggcccggggccggagctgagcggcccgagcaccccgcagaagctgccggtgcccgcgcccggcggccggccctcgcccgcgccccccgcagccgcgcagccgcccgcggccgcagtgcccgggccctcagtgccgcagccggccccggggcagccctcgcccgtcctccagctgcagcagaagcagagccgcatcagccccatccagaaaccgcaaggcctggaccccgtggaaattctgcaagagcgggaatacagacttcaggcccgcatagctcataggatacaagaactggaaaatctgcctggctctttgccaccagatttaagaaccaaagcaaccgtggaactaaaagcacttcggttactcaatttccagcgtcagctgagacaggaggtggtggcctgcatgcgcagggacacgaccctggagacggctctcaactccaaagcatacaaacggagcaagcgccagactctgagagaagctcgcatgaccgagaagctggagaagcagcagaagattgagcaggagaggaaacgccgtcagaaacaccaggaatacctgaacagtattttgcaacatgcaaaagattttaaggaatatcatcggtctgtggccggaaagatccagaagctctccaaagcagtggcaacttggcatgccaacactgaaagagagcagaagaaggagacagagcggattgaaaaggagagaatgcggcgactgatggctgaagatgaggagggttatagaaaactgattgatcaaaagaaagacaggcgtttagcttaccttttgcagcagaccgatgagtatgtagccaatctgaccaatctggtttgggagcacaagcaagcccaggcagccaaagagaagaagaagaggaggaggaggaagaagaaggctgaggagaatgcagagggtggggagtctgccctgggaccggatggagagcccatagatgagagcagccagatgagtgacctccctgtcaaagtgactcacacagaaaccggcaaggttctgttcggaccagaagcacccaaagcaagtcagctggacgcctggctggaaatgaatcctggttatgaagttgcccctagatctgacagtgaagagagtgattctgattatgaggaagaggatgaggaagaagagtccagtaggcaggaaaccgaagagaaaatactcctggatccaaatagcgaagaagtttctgagaaggatgctaagcagatcattgagacagctaagcaagacgtggatgatgaatacagcatgcagtacagtgccaggggctcccagtcctactacaccgtggctcatgccatctcggagagggtggagaaacagtctgccctcctaattaatgggaccctaaagcattaccagctccagggcctggaatggatggtttccctgtataataacaacttgaacggaatcttagccgatgaaatggggcttggaaagaccatacagaccattgcactcatcacttatctgatggagcacaaaagactcaatggcccctatctcatcattgttcccctttcgactctatctaactggacatatgaatttgacaaatgggctccttctgtggtgaagatttcttacaagggtactcctgccatgcgtcgctcccttgtcccccagctacggagtggcaaattcaatgtcctcttgactacttatgagtatattataaaagacaagcacattcttgcaaagattcggtggaaatacatgatagtggacgaaggccaccgaatgaagaatcaccactgcaagctgactcaggtggacttaaatgaagaagaaactatattgatcatcaggcgtctacataaggtgttaagaccatttttactaaggagactgaagaaagaagttgaatcccagcttcccgaaaaagtggaatatgtgatcaagtgtgacatgtcagctctgcagaagattctgtatcgccatatgcaagccaaggggatccttctcacagatggttctgagaaagataagaaggggaaaggaggtgctaagacacttatgaacactattatgcagttgagaaaaatctgcaaccacccatatatgtttcagcacattgaggaatcctttgctgaacacctaggctattcaaatggggtcatcaatggggctgaactgtatcgggcctcagggaagtttgagctgcttgatcgtattctgccaaaattgagagcgactaatcaccgagtgctgcttttctgccagatgacatctctcatgaccatcatggaggattattttgcttttcggaacttcctttacctacgccttgatggcaccaccaagtctgaagatcgtgctgctttgctgaagaaattcaatgaacctggatcccagtatttcattttcttgctgagcacaagagctggtggcctgggcttaaatcttcaggcagctgatacagtggtcatctttgacagcgactggaatcctcatcaggatctgcaggcccaagaccgagctcaccgcatcgggcagcagaacgaggtccgggtactgaggctctgtaccgtgaacagcgtggaggaaaagatcctcgcggccgcaaaatacaagctgaacgtggatcagaaagtgatccaggcgggcatgtttgaccaaaagtcttcaagccacgagcggagggcattcctgcaggccatcttggagcatgaggaggaaaatgaggaagaagatgaagtaccggacgatgagactctgaaccaaatgattgctcgacgagaagaagaatttgacctttttatgcggatggacatggaccggcggagggaagatgcccggaacccgaaacggaagccccgtttaatggaggaggatgagctgccctcctggatcattaaggatgacgctgaagtagaaaggctcacctgtgaagaagaggaggagaaaatatttgggagggggtcccgccagcgccgtgacgtggactacagtgacgccctcacggagaagcagtggctaagggccatcgaagacggcaatttggaggaaatggaagaggaagtacggcttaagaagcgaaaaagacgaagaaatgtggataaagatcctgcaaaagaagatgtggaaaaagctaagaagagaagaggccgccctcccgctgagaaactgtcaccaaatccccccaaactgacaaagcagatgaacgctatcatcgatactgtgataaactacaaagatagttcagggcgacagctcagtgaagtcttcattcagttaccttcaaggaaagaattaccagaatactatgaattaattaggaagccagtggatttcaaaaaaataaaggaaaggattcgtaatcataagtaccggagcctaggcgacctggagaaggatgtcatgcttctctgtcacaacgctcagacgttcaacctggagggatcccagatctatgaagactccatcgtcttacagtcagtgtttaagagtgcccggcagaaaattgccaaagaggaagagagtgaggatgaaagcaatgaagaggaggaagaggaagatgaagaagagtcagagtccgaggcaaaatcagtcaaggtgaaaattaagctcaataaaaaagatgacaaaggccgggacaaagggaaaggcaagaaaaggccaaatcgaggaaaagccaaacctgtagtgagcgattttgacagcgatgaggagcaggatgaacgtgaacagtcagaaggaagtgggacggatgatgagtgatcagtatggacctttttccttggtagaactgaattccttcctcccctgtctcatttctacccagtgagttcatttgtcatataggcactgggttgtttctatatcatcatcgtctataaactagctttaggatagtgccagacaaacatatgatatcatggtgtaaaaaacacacacatacacaaatatttgtaacatattgtgaccaaatgggcctcaaagattcagattgaaacaaacaaaaagcttttgatggaaaatatgtgggtggatagtatatttctatgggtgggtctaatttggtaacggtttgattgtgcctggttttatcacctgttcagatgagaagatttttgtcttttgtagcactgataaccaggagaagccattaaaagccactggttattttatttttcatcaggcaattttcgaggtttttatttgttcggtattgtttttttacactgtggtacatataagcaactttaataggtgataaatgtacagtagttagatttcacctgcatatacatttttccattttatgctctatgatctgaacaaaagctttttgaattgtataagatttatgtctactgtaaacattgcttaatttttttgctcttgatttaaaaaaaagttttgttgaaagcgctattgaatattgcaatctatatagtgtattggatggcttcttttgtcaccctgatctcctatgttaccaatgtgtatcgtctccttctccctaaagtgtacttaatctttgctttctttgcacaatgtctttggttgcaagtcataagcctgaggcaaataaaattccagtaatttcgaagaatgtggtgttggtgctttcctaataaagaaataatttagcttgacaaaaaaaaaaaaaaa

SEQ ID NO: 179 - protein, 248 aa, Homo sapiens
MWLAIEDGNLEEMEEEVRLKKRKRRRNVDKDPAKEDVEKAKKRRGRPPAEKLSPNPPKLTKQMNAIIDTVINYKDSSGRQLSEVFIQLPSRKELPEYYELIRKPVDFKKIKERIRNHKYRSLGDLEKDVMLLCHNAQTFNLEGSQIYEDSIVLQSVFKSARQKIAKEEESEDESNEEEEEEDEEESESEAKSVKVKIKLNKKDDKGRDKGKGKKRPNRGKAKPVVSDFDSDEEQDEREQSEGSGTDDE

SEQ ID NO: 180 - DNA, 1846 bp, Homo sapiens
cttggagaggcggaggtggaaacgatgcgcaggagttggcttggggctttttgtttgcgtgtccctgtttacctattcataatcatggatcccctctgctttgtgatactgtgaaccacgcataacagcaattctttacaccaccgggttgagaagaaggcgcctgaggctgactttctggacctgccgtcacgcagtaaagatgtggttggccatcgaagacggcaatttggaggaaatggaagaggaagtacggcttaagaagcgaaaaagacgaagaaatgtggataaagatcctgcaaaagaagatgtggaaaaagctaagaagagaagaggccgccctcccgctgagaaactgtcaccaaatccccccaaactgacaaagcagatgaacgctatcatcgatactgtgataaactacaaagatagttcagggcgacagctcagtgaagtcttcattcagttaccttcaaggaaagaattaccagaatactatgaattaattaggaagccagtggatttcaaaaaaataaaggaaaggattcgtaatcataagtaccggagcctaggcgacctggagaaggatgtcatgcttctctgtcacaacgctcagacgttcaacctggagggatcccagatctatgaagactccatcgtcttacagtcagtgtttaagagtgcccggcagaaaattgccaaagaggaagagagtgaggatgaaagcaatgaagaggaggaagaggaagatgaagaagagtcagagtccgaggcaaaatcagtcaaggtgaaaattaagctcaataaaaaagatgacaaaggccgggacaaagggaaaggcaagaaaaggccaaatcgaggaaaagccaaacctgtagtgagcgattttgacagcgatgaggagcaggatgaacgtgaacagtcagaaggaagtgggacggatgatgagtgatcagtatggacctttttccttggtagaactgaattccttcctcccctgtctcatttctacccagtgagttcatttgtcatataggcactgggttgtttctatatcatcatcgtctataaactagctttaggatagtgccagacaaacatatgatatcatggtgtaaaaaacacacacatacacaaatatttgtaacatattgtgaccaaatgggcctcaaagattcagattgaaacaaacaaaaagcttttgatggaaaatatgtgggtggatagtatatttctatgggtgggtctaatttggtaacggtttgattgtgcctggttttatcacctgttcagatgagaagatttttgtcttttgtagcactgataaccaggagaagccattaaaagccactggttattttatttttcatcaggcaattttcgaggtttttatttgttcggtattgtttttttacactgtggtacatataagcaactttaataggtgataaatgtacagtagttagatttcacctgcatatacatttttccattttatgctctatgatctgaacaaaagctttttgaattgtataagatttatgtctactgtaaacattgcttaatttttttgctcttgatttaaaaaaaagttttgttgaaagcgctattgaatattgcaatctatatagtgtattggatggcttcttttgtcaccctgatctcctatgttaccaatgtgtatcgtctccttctccctaaagtgtacttaatctttgctttctttgcacaatgtctttggttgcaagtcataagcctgaggcaaataaaattccagtaatttcgaagaatgtggtgttggtgctttcctaataaagaaataatttagcttgacaaaaaaaaaaaaaaa

SEQ ID NO: 181 - protein, 276 aa, Homo sapiens
MKRLAARCFAGLLILSPLTVISDSRPADSGKAIEDGNLEEMEEEVRLKKRKRRRNVDKDPAKEDVEKAKKRRGRPPAEKLSPNPPKLTKQMNAIIDTVINYKDSSGRQLSEVFIQLPSRKELPEYYELIRKPVDFKKIKERIRNHKYRSLGDLEKDVMLLCHNAQTFNLEGSQIYEDSIVLQSVFKSARQKIAKEEESEDESNEEEEEEDEEESESEAKSVKVKIKLNKKDDKGRDKGKGKKRPNRGKAKPVVSDFDSDEEQDEREQSEGSGTDDE

SEQ ID NO: 182 - DNA, 1833 bp, Homo sapiens
attcacttcattaaatctagaggcagttgagcatgggagccgtctgtatgttgaattagggctcgcactcttgcgcaacacgtcaccagtcggaaactggggctgatgaagagactagcagctcgctgctttgctggcttgttaattttatccccactaactgtgatttctgatagccggcctgctgatagtggtaaggccatcgaagacggcaatttggaggaaatggaagaggaagtacggcttaagaagcgaaaaagacgaagaaatgtggataaagatcctgcaaaagaagatgtggaaaaagctaagaagagaagaggccgccctcccgctgagaaactgtcaccaaatccccccaaactgacaaagcagatgaacgctatcatcgatactgtgataaactacaaagatagttcagggcgacagctcagtgaagtcttcattcagttaccttcaaggaaagaattaccagaatactatgaattaattaggaagccagtggatttcaaaaaaataaaggaaaggattcgtaatcataagtaccggagcctaggcgacctggagaaggatgtcatgcttctctgtcacaacgctcagacgttcaacctggagggatcccagatctatgaagactccatcgtcttacagtcagtgtttaagagtgcccggcagaaaattgccaaagaggaagagagtgaggatgaaagcaatgaagaggaggaagaggaagatgaagaagagtcagagtccgaggcaaaatcagtcaaggtgaaaattaagctcaataaaaaagatgacaaaggccgggacaaagggaaaggcaagaaaaggccaaatcgaggaaaagccaaacctgtagtgagcgattttgacagcgatgaggagcaggatgaacgtgaacagtcagaaggaagtgggacggatgatgagtgatcagtatggacctttttccttggtagaactgaattccttcctcccctgtctcatttctacccagtgagttcatttgtcatataggcactgggttgtttctatatcatcatcgtctataaactagctttaggatagtgccagacaaacatatgatatcatggtgtaaaaaacacacacatacacaaatatttgtaacatattgtgaccaaatgggcctcaaagattcagattgaaacaaacaaaaagcttttgatggaaaatatgtgggtggatagtatatttctatgggtgggtctaatttggtaacggtttgattgtgcctggttttatcacctgttcagatgagaagatttttgtcttttgtagcactgataaccaggagaagccattaaaagccactggttattttatttttcatcaggcaattttcgaggtttttatttgttcggtattgtttttttacactgtggtacatataagcaactttaataggtgataaatgtacagtagttagatttcacctgcatatacatttttccattttatgctctatgatctgaacaaaagctttttgaattgtataagatttatgtctactgtaaacattgcttaatttttttgctcttgatttaaaaaaaagttttgttgaaagcgctattgaatattgcaatctatatagtgtattggatggcttcttttgtcaccctgatctcctatgttaccaatgtgtatcgtctccttctccctaaagtgtacttaatctttgctttctttgcacaatgtctttggttgcaagtcataagcctgaggcaaataaaattccagtaatttcgaagaatgtggtgttggtgctttcctaataaagaaataatttagcttgacaaaaaaaaaaaaaaa

SEQ ID NO: 183 - protein, 278 aa, Homo sapiens
MLMKRLAARCFAGLLILSPLTVISDSRPADSGKAIEDGNLEEMEEEVRLKKRKRRRNVDKDPAKEDVEKAKKRRGRPPAEKLSPNPPKLTKQMNAIIDTVINYKDSSGRQLSEVFIQLPSRKELPEYYELIRKPVDFKKIKERIRNHKYRSLGDLEKDVMLLCHNAQTFNLEGSQIYEDSIVLQSVFKSARQKIAKEEESEDESNEEEEEEDEEESESEAKSVKVKIKLNKKDDKGRDKGKGKKRPNRGKAKPVVSDFDSDEEQDEREQSEGSGTDDE

SEQ ID NO: 184 - DNA, 2254 bp, Homo sapiens
acttcattaaatctagaggcagttgagcatgggagccgtctgtatgttgaattagggctcgcactcttgcgcaacacgtcaccagtcggaaactgggggtttgcttctgtgatttatttcattattgtgctggtaaaaggtttggaagggaattctttttgggggtagtactttagcattgtgtagcaagttttggggttttttttgtgtgtgaccccccagcccccagcgctgagtttgagtcagttgagccagtttagtaaataattttttaaaataaaagaacagtttaaaatctccatgaataattttacttacatgcaggagtaatcttactctactctttatgtgcgaaaagcattgggaagtgtttagtgaattgatttccattagaaaaagacccttagaaatcacagaacataaagcactgcatatggatgtgtttggggtctttggggaggagggaagatgttttgtagctctctgcattcctgcataaaaccttagtttgaggggaataatgctgatgaagagactagcagctcgctgctttgctggcttgttaattttatccccactaactgtgatttctgatagccggcctgctgatagtggtaaggccatcgaagacggcaatttggaggaaatggaagaggaagtacggcttaagaagcgaaaaagacgaagaaatgtggataaagatcctgcaaaagaagatgtggaaaaagctaagaagagaagaggccgccctcccgctgagaaactgtcaccaaatccccccaaactgacaaagcagatgaacgctatcatcgatactgtgataaactacaaagatagttcagggcgacagctcagtgaagtcttcattcagttaccttcaaggaaagaattaccagaatactatgaattaattaggaagccagtggatttcaaaaaaataaaggaaaggattcgtaatcataagtaccggagcctaggcgacctggagaaggatgtcatgcttctctgtcacaacgctcagacgttcaacctggagggatcccagatctatgaagactccatcgtcttacagtcagtgtttaagagtgcccggcagaaaattgccaaagaggaagagagtgaggatgaaagcaatgaagaggaggaagaggaagatgaagaagagtcagagtccgaggcaaaatcagtcaaggtgaaaattaagctcaataaaaaagatgacaaaggccgggacaaagggaaaggcaagaaaaggccaaatcgaggaaaagccaaacctgtagtgagcgattttgacagcgatgaggagcaggatgaacgtgaacagtcagaaggaagtgggacggatgatgagtgatcagtatggacctttttccttggtagaactgaattccttcctcccctgtctcatttctacccagtgagttcatttgtcatataggcactgggttgtttctatatcatcatcgtctataaactagctttaggatagtgccagacaaacatatgatatcatggtgtaaaaaacacacacatacacaaatatttgtaacatattgtgaccaaatgggcctcaaagattcagattgaaacaaacaaaaagcttttgatggaaaatatgtgggtggatagtatatttctatgggtgggtctaatttggtaacggtttgattgtgcctggttttatcacctgttcagatgagaagatttttgtcttttgtagcactgataaccaggagaagccattaaaagccactggttattttatttttcatcaggcaattttcgaggtttttatttgttcggtattgtttttttacactgtggtacatataagcaactttaataggtgataaatgtacagtagttagatttcacctgcatatacatttttccattttatgctctatgatctgaacaaaagctttttgaattgtataagatttatgtctactgtaaacattgcttaatttttttgctcttgatttaaaaaaaagttttgttgaaagcgctattgaatattgcaatctatatagtgtattggatggcttcttttgtcaccctgatctcctatgttaccaatgtgtatcgtctccttctccctaaagtgtacttaatctttgctttctttgcacaatgtctttggttgcaagtcataagcctgaggcaaataaaattccagtaatttcgaagaatgtggtgttggtgctttcctaataaagaaataatttagcttgacaaaaaaaaaaaaaaa

SEQ ID NO: 185 - DNA, 5831 bp, Mus musculus
ctcgctccctctgtttctgtactctgggtgactcagagagggaagattcagccagcacactgctcgcgagcaagtgtcactctgctaactggcagagccaggagacctagatgtccacacccacagacccagcagcaatgccccatcctgggccctccccggggcctggaccctctcctggaccaattctggggcctagtccaggaccaggaccatccccaggttctgtgcacagcatgatgggtcctagtcccggacctcccagcgtctcacatcctctgtcaacgatgggctctgcagacttcccacaggaaggcatgcaccaattacataagcccatggatgggatacatgacaaagggattgtagaagatgtccactgtggatccatgaagggcaccagcatgcgccccccacacccaggaatgggccctccacagagccccatggaccagcacagccaaggttatatgtcaccacatccgtctcctctgggagccccggagcacgtctctagccctatatctggaggaggcccaaccccaccccagatgccaccgagccagccaggggcactcatcccaggagatccgcaggccatgaaccagcctaacagaggtccctcgcctttcagtcctgtgcagctgcatcagcttcgagctcagattttagcttacaaaatgttggccaggggccagcctctccctgaaactctgcagctggcagtccagggaaaaaggaccttgcctggcatgcagcagcagcagcagcaacaacaacaacagcagcagcagcagcagcagcagcagcagcaacagcagcaacaacagcagccccagcagcctcagcagcaggctcaggcacagccccagcagcagcagcaacagcagcagcagccagctcttgttagctataatcgaccatctggccccgggcaggagctgctactgagtggccagagcgctccgcagaagctgtcagcaccagcaccaagcggccgaccttcaccggcaccccaggccgccgtccagcccacggccacagcggtgcccgggccctccgtgcagcagcccgccccagggcagccgtctccggtcctacagctgcaacagaagcagagccgcatcagccccatccagaaaccgcaaggcctggacccggtggagatcctgcaggaacgagagtacagacttcaagctcgcatcgctcataggatacaagaactggaaagtctgcctggttccttgccaccagatttacgcaccaaagcaaccgtggaactgaaagcacttcgcttactcaacttccaacgtcagctgagacaggaggtggtggcctgcatgcggagggacaccaccctggagacggccctcaactccaaagcatataagcggagcaagcgccagaccctgcgtgaggcacgcatgacagagaaactggagaagcagcagaagatagaacaggagaggaaacgccggcagaaacaccaggaatacctgaacagtattttgcaacatgcaaaagattttaaggaatatcaccggtctgtggccgggaagatccagaagctctccaaagcagtggcgacttggcatgctaacacagaaagggagcagaagaaggagacggagcggatcgagaaggagagaatgcggaggctgatggccgaagatgaagagggctacaggaagcttattgaccaaaagaaagacagacgtctcgcctacctattgcagcagaccgatgagtatgtcgccaatctgaccaacctggtgtgggagcacaagcaggcccaagcagccaaagagaagaagaagaggaggaggaggaagaagaaggctgaagagaatgcagagggaggggaacctgccctgggaccagatggagagccaatagatgaaagcagccagatgagtgacctgcctgtcaaagtgacacacacagaaactggcaaggtcctctttggaccagaagcacccaaagcaagtcagctggatgcctggctggagatgaatcctggttacgaagttgcacccagatctgacagtgaagagagtgaatcggactacgaggaggaggatgaagaagaagagtccagtaggcaggaaaccgaggagaagatactgctggatcccaacagtgaagaagtttccgaaaaggatgccaagcagatcattgagactgcgaagcaggacgtggacgacgaatacagcatgcagtacagtgccagaggctctcagtcctactacacggtggctcacgctatctctgagagggtggagaagcagtctgccctcctcattaacggcaccctaaagcattaccagctccagggcctggaatggatggtttccctgtataataacaatctgaacggaatcttagctgatgaaatggggctaggcaagaccatccagaccattgcactcatcacgtatctgatggagcacaaaaggctcaatggtccctacctcatcatcgtccccctctcgactctgtctaactggacatatgaatttgacaaatgggctccttctgtggtgaaaatttcttacaagggtacccctgccatgcgacgctccctcgttccccagctacggagtggcaaattcaatgtcctcctgactacttacgagtacattataaaagacaagcacattcttgcaaagattcggtggaagtacatgatcgtggacgaaggccaccggatgaagaatcaccactgcaagctaacccaggtcctgaacacacactatgtggcccccaggcggatccttctgactgggaccccactgcagaataagcttccggaactctgggccctcctcaacttcctcctccctacaatcttcaagagttgcagcacatttgagcagtggtttaatgctccatttgccatgaccggtgaaagggtggacctgaacgaagaagaaacgattttgatcatcaggcgtctacacaaggtgctgagaccctttttactgaggaggctgaagaaagaggttgagtctcagcttccggaaaaggttgagtatgtgatcaagtgtgacatgtcagctctgcagaagattctgtaccgtcacatgcaagccaaggggatcctcctcacggacgggtctgagaaagataagaaggggaaaggaggtgccaagacacttatgaacaccatcatgcagctgagaaaaatatgcaaccacccatatatgtttcagcacattgaggaatcctttgctgaacacctgggctattcgaatggggtcatcaatggggctgagctgtatcgggcctcgggaaagtttgagctgcttgatcgtattctgcccaaattgagagcgactaaccaccgcgtgctgcttttctgccagatgacgtcactcatgaccattatggaggattactttgcttttcggaacttcctgtacctgcgccttgacggcaccaccaagtctgaagatcgtgctgctttgctaaagaaattcaatgaacctgggtcccagtatttcattttcttgctgagcacaagagcagggggcctgggcttaaatcttcaggcggcagacacggtggtcatatttgacagcgactggaatcctcaccaggatctgcaggcccaagaccgagctcaccgcattggccaacaaaacgaggtccgggtgctgaggctttgcaccgtcaacagtgtggaggaaaagattctcgcggctgccaagtacaagctgaacgtggatcagaaggttatccaagcaggcatgtttgaccagaagtcatccagccacgagcggagggccttcctgcaggccattctggagcacgaggaggagaatgaggaagaagatgaggtaccagacgacgagaccctgaaccagatgattgctcgccgggaggaagaatttgatctttttatgcgcatggacatggaccggcggagggaggatgcccggaacccgaagcgcaaaccccgcttgatggaggaagatgagctgccctcctggattatcaaggatgacgccgaagtggaaaggctcacctgtgaagaagaggaggagaagatatttgggaggggctctcgccagcgccgggatgtggactacagtgatgccctcaccgagaagcaatggctcagggccatcgaagacggcaatttggaagaaatggaagaggaggtacggcttaagaagagaaaaagacgaagaaatgtggataaagaccccgtgaaggaagatgtggaaaaagcgaagaaaagaagaggccgccctccggctgagaagttgtcaccaaatcccccaaaactaacgaagcagatgaacgccatcattgatactgtgataaactacaaagacagttcagggcgacagctcagtgaagtcttcattcagttaccttccaggaaagacttaccagaatactatgaattaattaggaagccagtggatttcaaaaagataaaggagcgaatccgtaatcataagtatcggagcctgggagacctggagaaagacgtcatgcttctctgtcacaacgcacagacattcaacttggaaggatcccagatctacgaagactccattgtcctacagtcagtgtttaagagtgctcggcagaaaattgccaaagaagaagagagtgaggaagaaagcaatgaagaagaggaagaagatgatgaagaggagtcggagtcagaggcgaaatctgtgaaggtgaaaatcaagctgaataaaaaggaagagaaaggccgggacacagggaagggcaagaagcggccaaaccgaggcaaagccaaacccgtcgtgagcgattttgacagtgacgaggaacaggaagagaacgaacagtcagaagcaagtggaactgataacgagtgaccatcctggacgtgagcttcccgcggtggcagaaccgaatgctttcttccccctctccttcctccccagtgagttcacttgccattcgggcacactgggttatttctccgtcctcattgtcatctagaactagctttagggtagtgccagacaaacatatgatatcatggtgtaaaaaaagaaacacatgcgtgcagacacactacacacacacacacacacacacacacacacacacacacatatttgtaacatattgtgaccaaatgggcctcaaagattcaaagattaaaaacaaaaagcttttgatggaaaagatgtgggtggatagtatatttctacaggtgggtcaggtttggtagcagtttgatgtgctgggttctgtcatctgttctgatgagaagatttttatcttctgcagtgctgatggccgggaggaaccattcaaagccactggttattttgtttttcatcaggcgattttcaagattttcatttgtttcagtattgttggttttctcttttctcttttttacactgtggtacatataagcaacttgactagtgacaaatgtacagtagttagatatcacctacatatacatttttccattttatgctctatgatctgaagaacaaaaaaaaaagctttttgacttgtataagatttatgtctactgtaaacattgcggaatttttttttgttcttgttttattgacaatgctattgagtattacagtgtctagaataccctggatggcttctcttgtccacccgatctcccgtgttaccaatgtgtatggtctccttctcccgaaagtgtacttaatctttgctttctttgcacaatgtctttggttgcaagtcataagcctgaggcaaataaaattccagtaatttccaagaatgtggtgttggtactttcctaataaaccgataacgtaccttgaaaaaaaaaaaaaaaaaaa

SEQ ID NO: 186 - protein, 1583 aa, Mus musculus
MSTPTDPAAMPHPGPSPGPGPSPGPILGPSPGPGPSPGSVHSMMGPSPGPPSVSHPLSTMGSADFPQEGMHQLHKPMDGIHDKGIVEDVHCGSMKGTSMRPPHPGMGPPQSPMDQHSQGYMSPHPSPLGAPEHVSSPISGGGPTPPQMPPSQPGALIPGDPQAMNQPNRGPSPFSPVQLHQLRAQILAYKMLARGQPLPETLQLAVQGKRTLPGMQQQQQQQQQQQQQQQQQQQQQQQQQQPQQPQQQAQAQPQQQQQQQQQPALVSYNRPSGPGQELLLSGQSAPQKLSAPAPSGRPSPAPQAAVQPTATAVPGPSVQQPAPGQPSPVLQLQQKQSRISPIQKPQGLDPVEILQEREYRLQARIAHRIQELESLPGSLPPDLRTKATVELKALRLLNFQRQLRQEVVACMRRDTTLETALNSKAYKRSKRQTLREARMTEKLEKQQKIEQERKRRQKHQEYLNSILQHAKDFKEYHRSVAGKIQKLSKAVATWHANTEREQKKETERIEKERMRRLMAEDEEGYRKLIDQKKDRRLAYLLQQTDEYVANLTNLVWEHKQAQAAKEKKKRRRRKKKAEENAEGGEPALGPDGEPIDESSQMSDLPVKVTHTETGKVLFGPEAPKASQLDAWLEMNPGYEVAPRSDSEESESDYEEEDEEEESSRQETEEKILLDPNSEEVSEKDAKQIIETAKQDVDDEYSMQYSARGSQSYYTVAHAISERVEKQSALLINGTLKHYQLQGLEWMVSLYNNNLNGILADEMGLGKTIQTIALITYLMEHKRLNGPYLIIVPLSTLSNWTYEFDKWAPSVVKISYKGTPAMRRSLVPQLRSGKFNVLLTTYEYIIKDKHILAKIRWKYMIVDEGHRMKNHHCKLTQVLNTHYVAPRRILLTGTPLQNKLPELWALLNFLLPTIFKSCSTFEQWFNAPFAMTGERVDLNEEETILIIRRLHKVLRPFLLRRLKKEVESQLPEKVEYVIKCDMSALQKILYRHMQAKGILLTDGSEKDKKGKGGAKTLMNTIMQLRKICNHPYMFQHIEESFAEHLGYSNGVINGAELYRASGKFELLDRILPKLRATNHRVLLFCQMTSLMTIMEDYFAFRNFLYLRLDGTTKSEDRAALLKKFNEPGSQYFIFLLSTRAGGLGLNLQAADTVVIFDSDWNPHQDLQAQDRAHRIGQQNEVRVLRLCTVNSVEEKILAAAKYKLNVDQKVIQAGMFDQKSSSHERRAFLQAILEHEEENEEEDEVPDDETLNQMIARREEEFDLFMRMDMDRRREDARNPKRKPRLMEEDELPSWIIKDDAEVERLTCEEEEEKIFGRGSRQRRDVDYSDALTEKQWLRAIEDGNLEEMEEEVRLKKRKRRRNVDKDPVKEDVEKAKKRRGRPPAEKLSPNPPKLTKQMNAIIDTVINYKDSSGRQLSEVFIQLPSRKDLPEYYELIRKPVDFKKIKERIRNHKYRSLGDLEKDVMLLCHNAQTFNLEGSQIYEDSIVLQSVFKSARQKIAKEEESEEESNEEEEEDDEEESESEAKSVKVKIKLNKKEEKGRDTGKGKKRPNRGKAKPVVSDFDSDEEQEENEQSEASGTDNE

SEQ ID NO: 187 - DNA, 1964 bp, Mus musculus
ttcacttcattaaatctagaggcggttcagcatgggagccgtctgtatgttgaattagggctcgctctcttgcgcaacacgtcaccagtcggaaactgggggtttgcttctgtgatttatttcattattgtgctggtaaaagctgatgaagagactagcagctcgctgctttgccggcttgttaattttatccccactaactgtgatttccgatagccggcctgctgatagtggtaagtgcggctggctctggtttaaagcaagcgtttgcaggccatcgaagacggcaatttggaagaaatggaagaggaggtacggcttaagaagagaaaaagacgaagaaatgtggataaagaccccgtgaaggaagatgtggaaaaagcgaagaaaagaagaggccgccctccggctgagaagttgtcaccaaatcccccaaaactaacgaagcagatgaacgccatcattgatactgtgataaactacaaagacagttcagggcgacagctcagtgaagtcttcattcagttaccttccaggaaagacttaccagaatactatgaattaattaggaagccagtggatttcaaaaagataaaggagcgaatccgtaatcataagtatcggagcctgggagacctggagaaagacgtcatgcttctctgtcacaacgcacagacattcaacttggaaggatcccagatctacgaagactccattgtcctacagtcagtgtttaagagtgctcggcagaaaattgccaaagaagaagagagtgaggaagaaagcaatgaagaagaggaagaagatgatgaagaggagtcggagtcagaggcgaaatctgtgaaggtgaaaatcaagctgaataaaaaggaagagaaaggccgggacacagggaagggcaagaagcggccaaaccgaggcaaagccaaacccgtcgtgagcgattttgacagtgacgaggaacaggaagagaacgaacagtcagaagcaagtggaactgataacgagtgaccatcctggacgtgagcttcccgcggtggcagaaccgaatgctttcttccccctctccttcctccccagtgagttcacttgccattcgggcacactgggttatttctccgtcctcattgtcatctagaactagctttagggtagtgccagacaaacatatgatatcatggtgtaaaaaaagaaacacatgcgtgcagacacactacacacacacacacacacacacacacacacacacacacatatttgtaacatattgtgaccaaatgggcctcaaagattcaaagattaaaaacaaaaagcttttgatggaaaagatgtgggtggatagtatatttctacaggtgggtcaggtttggtagcagtttgatgtgctgggttctgtcatctgttctgatgagaagatttttatcttctgcagtgctgatggccgggaggaaccattcaaagccactggttattttgtttttcatcaggcgattttcaagattttcatttgtttcagtattgttggttttctcttttctcttttttacactgtggtacatataagcaacttgactagtgacaaatgtacagtagttagatatcacctacatatacatttttccattttatgctctatgatctgaagaacaaaaaaaaaagctttttgacttgtataagatttatgtctactgtaaacattgcggaatttttttttgttcttgttttattgacaatgctattgagtattacagtgtctagaataccctggatggcttctcttgtccacccgatctcccgtgttaccaatgtgtatggtctccttctcccgaaagtgtacttaatctttgctttctttgcacaatgtctttggttgcaagtcataagcctgaggcaaataaaattccagtaatttccaagaatgtggtgttggtactttcctaataaaccgataacgtaccttgaaa

SEQ ID NO: 188 - protein, 236 aa, Mus musculus
MEEEVRLKKRKRRRNVDKDPVKEDVEKAKKRRGRPPAEKLSPNPPKLTKQMNAIIDTVINYKDSSGRQLSEVFIQLPSRKDLPEYYELIRKPVDFKKIKERIRNHKYRSLGDLEKDVMLLCHNAQTFNLEGSQIYEDSIVLQSVFKSARQKIAKEEESEEESNEEEEEDDEEESESEAKSVKVKIKLNKKEEKGRDTGKGKKRPNRGKAKPVVSDFDSDEEQEENEQSEASGTDNE

SEQ ID NO: 189 - DNA, 1979 bp, Mus musculus
acacacacacacacacacacacgcaggctgaagtatgcttaactcttttaacttggctggggctttttagcaccatatgggttctttcgtgacgtccggacccgaaagagtgcagtgtgcctttaaggaaagaggtacctcaccaaacttccctgtagttgtgcctcaccatttagctgatgaagagactagcagctcgctgctttgccggcttgttaattttatccccactaactgtgatttccgatagccggcctgctgatagtggtaaggccatcgaagacggcaatttggaagaaatggaagaggaggtacggcttaagaagagaaaaagacgaagaaatgtggataaagaccccgtgaaggaagatgtggaaaaagcgaagaaaagaagaggccgccctccggctgagaagttgtcaccaaatcccccaaaactaacgaagcagatgaacgccatcattgatactgtgataaactacaaagacagttcagggcgacagctcagtgaagtcttcattcagttaccttccaggaaagacttaccagaatactatgaattaattaggaagccagtggatttcaaaaagataaaggagcgaatccgtaatcataagtatcggagcctgggagacctggagaaagacgtcatgcttctctgtcacaacgcacagacattcaacttggaaggatcccagatctacgaagactccattgtcctacagtcagtgtttaagagtgctcggcagaaaattgccaaagaagaagagagtgaggaagaaagcaatgaagaagaggaagaagatgatgaagaggagtcggagtcagaggcgaaatctgtgaaggtgaaaatcaagctgaataaaaaggaagagaaaggccgggacacagggaagggcaagaagcggccaaaccgaggcaaagccaaacccgtcgtgagcgattttgacagtgacgaggaacaggaagagaacgaacagtcagaagcaagtggaactgataacgagtgaccatcctggacgtgagcttcccgcggtggcagaaccgaatgctttcttccccctctccttcctccccagtgagttcacttgccattcgggcacactgggttatttctccgtcctcattgtcatctagaactagctttagggtagtgccagacaaacatatgatatcatggtgtaaaaaaagaaacacatgcgtgcagacacactacacacacacacacacacacacacacacacacacacacatatttgtaacatattgtgaccaaatgggcctcaaagattcaaagattaaaaacaaaaagcttttgatggaaaagatgtgggtggatagtatatttctacaggtgggtcaggtttggtagcagtttgatgtgctgggttctgtcatctgttctgatgagaagatttttatcttctgcagtgctgatggccgggaggaaccattcaaagccactggttattttgtttttcatcaggcgattttcaagattttcatttgtttcagtattgttggttttctcttttctcttttttacactgtggtacatataagcaacttgactagtgacaaatgtacagtagttagatatcacctacatatacatttttccattttatgctctatgatctgaagaacaaaaaaaaaagctttttgacttgtataagatttatgtctactgtaaacattgcggaatttttttttgttcttgttttattgacaatgctattgagtattacagtgtctagaataccctggatggcttctcttgtccacccgatctcccgtgttaccaatgtgtatggtctccttctcccgaaagtgtacttaatctttgctttctttgcacaatgtctttggttgcaagtcataagcctgaggcaaataaaattccagtaatttccaagaatgtggtgttggtactttcctaataaaccgataacgtaccttgaaaaaaaaaaaaaaaaaaa

SEQ ID NO: 190 - protein, 276 aa, Mus musculus
MKRLAARCFAGLLILSPLTVISDSRPADSGKAIEDGNLEEMEEEVRLKKRKRRRNVDKDPVKEDVEKAKKRRGRPPAEKLSPNPPKLTKQMNAIIDTVINYKDSSGRQLSEVFIQLPSRKDLPEYYELIRKPVDFKKIKERIRNHKYRSLGDLEKDVMLLCHNAQTFNLEGSQIYEDSIVLQSVFKSARQKIAKEEESEEESNEEEEEDDEEESESEAKSVKVKIKLNKKEEKGRDTGKGKKRPNRGKAKPVVSDFDSDEEQEENEQSEASGTDNE

SEQ ID NO: 191 - protein, 1679 aa, Homo sapiens
MSTPDPPLGGTPRPGPSPGPGPSPGAMLGPSPGPSPGSAHSMMGPSPGPPSAGHPIPTQGPGGYPQDNMHQMHKPMESMHEKGMSDDPRYNQMKGMGMRSGGHAGMGPPPSPMDQHSQGYPSPLGGSEHASSPVPASGPSSGPQMSSGPGGAPLDGADPQALGQQNRGPTPFNQNQLHQLRAQIMAYKMLARGQPLPDHLQMAVQGKRPMPGMQQQMPTLPPPSVSATGPGPGPGPGPGPGPGPAPPNYSRPHGMGGPNMPPPGPSGVPPGMPGQPPGGPPKPWPEGPMANAAAPTSTPQKLIPPQPTGRPSPAPPAVPPAASPVMPPQTQSPGQPAQPAPMVPLHQKQSRITPIQKPRGLDPVEILQEREYRLQARIAHRIQELENLPGSLAGDLRTKATIELKALRLLNFQRQLRQEVVVCMRRDTALETALNAKAYKRSKRQSLREARITEKLEKQQKIEQERKRRQKHQEYLNSILQHAKDFKEYHRSVTGKIQKLTKAVATYHANTEREQKKENERIEKERMRRLMAEDEEGYRKLIDQKKDKRLAYLLQQTDEYVANLTELVRQHKAAQVAKEKKKKKKKKKAENAEGQTPAIGPDGEPLDETSQMSDLPVKVIHVESGKILTGTDAPKAGQLEAWLEMNPGYEVAPRSDSEESGSEEEEEEEEEEQPQAAQPPTLPVEEKKKIPDPDSDDVSEVDARHIIENAKQDVDDEYGVSQALARGLQSYYAVAHAVTERVDKQSALMVNGVLKQYQIKGLEWLVSLYNNNLNGILADEMGLGKTIQTIALITYLMEHKRINGPFLIIVPLSTLSNWAYEFDKWAPSVVKVSYKGSPAARRAFVPQLRSGKFNVLLTTYEYIIKDKHILAKIRWKYMIVDEGHRMKNHHCKLTQVLNTHYVAPRRLLLTGTPLQNKLPELWALLNFLLPTIFKSCSTFEQWFNAPFAMTGEKVDLNEEETILIIRRLHKVLRPFLLRRLKKEVEAQLPEKVEYVIKCDMSALQRVLYRHMQAKGVLLTDGSEKDKKGKGGTKTLMNTIMQLRKICNHPYMFQHIEESFSEHLGFTGGIVQGLDLYRASGKFELLDRILPKLRATNHKVLLFCQMTSLMTIMEDYFAYRGFKYLRLDGTTKAEDRGMLLKTFNEPGSEYFIFLLSTRAGGLGLNLQSADTVIIFDSDWNPHQDLQAQDRAHRIGQQNEVRVLRLCTVNSVEEKILAAAKYKLNVDQKVIQAGMFDQKSSSHERRAFLQAILEHEEQDESRHCSTGSGSASFAHTAPPPAGVNPDLEEPPLKEEDEVPDDETVNQMIARHEEEFDLFMRMDLDRRREEARNPKRKPRLMEEDELPSWIIKDDAEVERLTCEEEEEKMFGRGSRHRKEVDYSDSLTEKQWLKKITGKDIHDTASSVARGLQFQRGLQFCTRASKAIEEGTLEEIEEEVRQKKSSRKRKRDSDAGSSTPTTSTRSRDKDDESKKQKKRGRPPAEKLSPNPPNLTKKMKKIVDAVIKYKDSSSGRQLSEVFIQLPSRKELPEYYELIRKPVDFKKIKERIRNHKYRSLNDLEKDVMLLCQNAQTFNLEGSLIYEDSIVLQSVFTSVRQKIEKEDDSEGEESEEEEEGEEEGSESESRSVKVKIKLGRKEKAQDRLKGGRRRPSRGSRAKPVVSDDDSEEEQEEDRSGSGSEED

SEQ ID NO: 192 - DNA, 5589 bp, Homo sapiens
ggcgggggaggcgccgggaagtcgacggcgccggcggctcctgcaggaggccactgtctgcagctcccgtgaagatgtccactccagacccacccctgggcggaactcctcggccaggtccttccccgggccctggcccttcccctggagccatgctgggccctagcccgggtccctcgccgggctccgcccacagcatgatggggcccagcccagggccgccctcagcaggacaccccatccccacccaggggcctggagggtaccctcaggacaacatgcaccagatgcacaagcccatggagtccatgcatgagaagggcatgtcggacgacccgcgctacaaccagatgaaaggaatggggatgcggtcagggggccatgctgggatggggcccccgcccagccccatggaccagcactcccaaggttacccctcgcccctgggtggctctgagcatgcctctagtccagttccagccagtggcccgtcttcggggccccagatgtcttccgggccaggaggtgccccgctggatggtgctgacccccaggccttggggcagcagaaccggggcccaaccccatttaaccagaaccagctgcaccagctcagagctcagatcatggcctacaagatgctggccagggggcagcccctccccgaccacctgcagatggcggtgcagggcaagcggccgatgcccgggatgcagcagcagatgccaacgctacctccaccctcggtgtccgcaacaggacccggccctggccctggccctggccccggcccgggtcccggcccggcacctccaaattacagcaggcctcatggtatgggagggcccaacatgcctcccccaggaccctcgggcgtgccccccgggatgccaggccagcctcctggagggcctcccaagccctggcctgaaggacccatggcgaatgctgctgcccccacgagcacccctcagaagctgattcccccgcagccaacgggccgcccttcccccgcgccccctgccgtcccacccgccgcctcgcccgtgatgccaccgcagacccagtcccccgggcagccggcccagcccgcgcccatggtgccactgcaccagaagcagagccgcatcacccccatccagaagccgcggggcctcgaccctgtggagatcctgcaggagcgcgagtacaggctgcaggctcgcatcgcacaccgaattcaggaacttgaaaaccttcccgggtccctggccggggatttgcgaaccaaagcgaccattgagctcaaggccctcaggctgctgaacttccagaggcagctgcgccaggaggtggtggtgtgcatgcggagggacacagcgctggagacagccctcaatgctaaggcctacaagcgcagcaagcgccagtccctgcgcgaggcccgcatcactgagaagctggagaagcagcagaagatcgagcaggagcgcaagcgccggcagaagcaccaggaatacctcaatagcattctccagcatgccaaggatttcaaggaatatcacagatccgtcacaggcaaaatccagaagctgaccaaggcagtggccacgtaccatgccaacacggagcgggagcagaagaaagagaacgagcggatcgagaaggagcgcatgcggaggctcatggctgaagatgaggaggggtaccgcaagctcatcgaccagaagaaggacaagcgcctggcctacctcttgcagcagacagacgagtacgtggctaacctcacggagctggtgcggcagcacaaggctgcccaggtcgccaaggagaaaaagaagaaaaagaaaaagaagaaggcagaaaatgcagaaggacagacgcctgccattgggccggatggcgagcctctggacgagaccagccagatgagcgacctcccggtgaaggtgatccacgtggagagtgggaagatcctcacaggcacagatgcccccaaagccgggcagctggaggcctggctcgagatgaacccggggtatgaagtagctccgaggtctgatagtgaagaaagtggctcagaagaagaggaagaggaggaggaggaagagcagccgcaggcagcacagcctcccaccctgcccgtggaggagaagaagaagattccagatccagacagcgatgacgtctctgaggtggacgcgcggcacatcattgagaatgccaagcaagatgtcgatgatgaatatggcgtgtcccaggcccttgcacgtggcctgcagtcctactatgccgtggcccatgctgtcactgagagagtggacaagcagtcagcgcttatggtcaatggtgtcctcaaacagtaccagatcaaaggtttggagtggctggtgtccctgtacaacaacaacctgaacggcatcctggccgacgagatgggcctggggaagaccatccagaccatcgcgctcatcacgtacctcatggagcacaaacgcatcaatgggcccttcctcatcatcgtgcctctctcaacgctgtccaactgggcgtacgagtttgacaagtgggccccctccgtggtgaaggtgtcttacaagggatccccagcagcaagacgggcctttgtcccccagctccggagtgggaagttcaacgtcttgctgacgacgtacgagtacatcatcaaagacaagcacatcctcgccaagatccgttggaagtacatgattgtggacgaaggtcaccgcatgaagaaccaccactgcaagctgacgcaggtgctcaacacgcactatgtggcaccccgccgcctgctgctgacgggcacaccgctgcagaacaagcttcccgagctctgggcgctgctcaacttcctgctgcccaccatcttcaagagctgcagcaccttcgagcagtggtttaacgcaccctttgccatgaccggggaaaaggtggacctgaatgaggaggaaaccattctcatcatccggcgtctccacaaagtgctgcggcccttcttgctccgacgactcaagaaggaagtcgaggcccagttgcccgaaaaggtggagtacgtcatcaagtgcgacatgtctgcgctgcagcgagtgctctaccgccacatgcaggccaagggcgtgctgctgactgatggctccgagaaggacaagaagggcaaaggcggcaccaagaccctgatgaacaccatcatgcagctgcggaagatctgcaaccacccctacatgttccagcacatcgaggagtccttttccgagcacttggggttcactggcggcattgtccaagggctggacctgtaccgagcctcgggtaaatttgagcttcttgatagaattcttcccaaactccgagcaaccaaccacaaagtgctgctgttctgccaaatgacctccctcatgaccatcatggaagattactttgcgtatcgcggctttaaatacctcaggcttgatggaaccacgaaggcggaggaccggggcatgctgctgaaaaccttcaacgagcccggctctgagtacttcatcttcctgctcagcacccgggctggggggctcggcctgaacctccagtcggcagacactgtgatcatttttgacagcgactggaatcctcaccaggacctgcaagcgcaggaccgagcccaccgcatcgggcagcagaacgaggtgcgtgtgctccgcctctgcaccgtcaacagcgtggaggagaagatcctagctgcagccaagtacaagctcaacgtggaccagaaggtgatccaggccggcatgttcgaccagaagtcctccagccatgagcggcgcgccttcctgcaggccatcctggagcacgaggagcaggatgagagcagacactgcagcacgggcagcggcagtgccagcttcgcccacactgcccctccgccagcgggcgtcaaccccgacttggaggagccacctctaaaggaggaagacgaggtgcccgacgacgagaccgtcaaccagatgatcgcccggcacgaggaggagtttgatctgttcatgcgcatggacctggaccgcaggcgcgaggaggcccgcaaccccaagcggaagccgcgcctcatggaggaggacgagctcccctcgtggatcatcaaggacgacgcggaggtggagcggctgacctgtgaggaggaggaggagaagatgttcggccgtggctcccgccaccgcaaggaggtggactacagcgactcactgacggagaagcagtggctcaagaaaattacaggaaaagatatccatgacacagccagcagtgtggcacgtgggctacaattccagcgtggccttcagttctgcacacgtgcgtcaaaggccatcgaggagggcacgctggaggagatcgaagaggaggtccggcagaagaaatcatcacggaagcgcaagcgagacagcgacgccggctcctccaccccgaccaccagcacccgcagccgcgacaaggacgacgagagcaagaagcagaagaagcgcgggcggccgcctgccgagaaactctcccctaacccacccaacctcaccaagaagatgaagaagattgtggatgccgtgatcaagtacaaggacagcagcagtggacgtcagctcagcgaggtcttcatccagctgccctcgcgaaaggagctgcccgagtactacgagctcatccgcaagcccgtggacttcaagaagataaaggagcgcattcgcaaccacaagtaccgcagcctcaacgacctagagaaggacgtcatgctcctgtgccagaacgcacagaccttcaacctggagggctccctgatctatgaagactccatcgtcttgcagtcggtcttcaccagcgtgcggcagaaaatcgagaaggaggatgacagtgaaggcgaggagagtgaggaggaggaagagggcgaggaggaaggctccgaatccgaatctcggtccgtcaaagtgaagatcaagcttggccggaaggagaaggcacaggaccggctgaagggcggccggcggcggccgagccgagggtcccgagccaagccggtcgtgagtgacgatgacagtgaggaggaacaagaggaggaccgctcaggaagtggcagcgaagaagactgagccccgacattccagtctcgaccccgagcccctcgttccagagctgagatggcataggccttagcagtaacgggtagcagcagatgtagtttcagacttggagtaaaactgtataaacaaaagaatcttccatatttatacagcagagaagctgtaggactgtttgtgactggccctgtcctggcatcagtagcatctgtaacagcattaactgtcttaaagagagagagagagaattccgaattggggaacacacgatacctgtttttcttttccgttgctggcagtactgttgcgccgcagtttggagtcactgtagttaagtgtggatgcatgtgcgtcaccgtccactcctcctactgtattttattggacaggtcagactcgccgggggcccggcgagggtatgtcagtgtcactggatgtcaaacagtaataaattaaaccaacaacaaaacgcacagccaaaaaaaaa

SEQ ID NO: 193 - protein, 1647 aa, Homo sapiens
MSTPDPPLGGTPRPGPSPGPGPSPGAMLGPSPGPSPGSAHSMMGPSPGPPSAGHPIPTQGPGGYPQDNMHQMHKPMESMHEKGMSDDPRYNQMKGMGMRSGGHAGMGPPPSPMDQHSQGYPSPLGGSEHASSPVPASGPSSGPQMSSGPGGAPLDGADPQALGQQNRGPTPFNQNQLHQLRAQIMAYKMLARGQPLPDHLQMAVQGKRPMPGMQQQMPTLPPPSVSATGPGPGPGPGPGPGPGPAPPNYSRPHGMGGPNMPPPGPSGVPPGMPGQPPGGPPKPWPEGPMANAAAPTSTPQKLIPPQPTGRPSPAPPAVPPAASPVMPPQTQSPGQPAQPAPMVPLHQKQSRITPIQKPRGLDPVEILQEREYRLQARIAHRIQELENLPGSLAGDLRTKATIELKALRLLNFQRQLRQEVVVCMRRDTALETALNAKAYKRSKRQSLREARITEKLEKQQKIEQERKRRQKHQEYLNSILQHAKDFKEYHRSVTGKIQKLTKAVATYHANTEREQKKENERIEKERMRRLMAEDEEGYRKLIDQKKDKRLAYLLQQTDEYVANLTELVRQHKAAQVAKEKKKKKKKKKAENAEGQTPAIGPDGEPLDETSQMSDLPVKVIHVESGKILTGTDAPKAGQLEAWLEMNPGYEVAPRSDSEESGSEEEEEEEEEEQPQAAQPPTLPVEEKKKIPDPDSDDVSEVDARHIIENAKQDVDDEYGVSQALARGLQSYYAVAHAVTERVDKQSALMVNGVLKQYQIKGLEWLVSLYNNNLNGILADEMGLGKTIQTIALITYLMEHKRINGPFLIIVPLSTLSNWAYEFDKWAPSVVKVSYKGSPAARRAFVPQLRSGKFNVLLTTYEYIIKDKHILAKIRWKYMIVDEGHRMKNHHCKLTQVLNTHYVAPRRLLLTGTPLQNKLPELWALLNFLLPTIFKSCSTFEQWFNAPFAMTGEKVDLNEEETILIIRRLHKVLRPFLLRRLKKEVEAQLPEKVEYVIKCDMSALQRVLYRHMQAKGVLLTDGSEKDKKGKGGTKTLMNTIMQLRKICNHPYMFQHIEESFSEHLGFTGGIVQGLDLYRASGKFELLDRILPKLRATNHKVLLFCQMTSLMTIMEDYFAYRGFKYLRLDGTTKAEDRGMLLKTFNEPGSEYFIFLLSTRAGGLGLNLQSADTVIIFDSDWNPHQDLQAQDRAHRIGQQNEVRVLRLCTVNSVEEKILAAAKYKLNVDQKVIQAGMFDQKSSSHERRAFLQAILEHEEQDESRHCSTGSGSASFAHTAPPPAGVNPDLEEPPLKEEDEVPDDETVNQMIARHEEEFDLFMRMDLDRRREEARNPKRKPRLMEEDELPSWIIKDDAEVERLTCEEEEEKMFGRGSRHRKEVDYSDSLTEKQWLKAIEEGTLEEIEEEVRQKKSSRKRKRDSDAGSSTPTTSTRSRDKDDESKKQKKRGRPPAEKLSPNPPNLTKKMKKIVDAVIKYKDSSSGRQLSEVFIQLPSRKELPEYYELIRKPVDFKKIKERIRNHKYRSLNDLEKDVMLLCQNAQTFNLEGSLIYEDSIVLQSVFTSVRQKIEKEDDSEGEESEEEEEGEEEGSESESRSVKVKIKLGRKEKAQDRLKGGRRRPSRGSRAKPVVSDDDSEEEQEEDRSGSGSEED

SEQ ID NO: 194 - DNA, 5779 bp, Homo sapiens
ggagaggccgccgcggtgctgagggggaggggagccggcgagcgcgcgcgcagcgggggcgcgggtggcgcgcgtgtgtgtgaagggggggcggtggccgaggcgggcgggcgcgcgcgcgaggcttcccctcgtttggcggcggcggcggcttctttgtttcgtgaagagaagcgagacgcccattctgcccccggccccgcgcggaggggcgggggaggcgccgggaagtcgacggcgccggcggctcctgcgtctcgcccttttgcccaggctagagtgcagtggtgcggtcatggttcactgcagcctcaacctcctggactcagcaggaggccactgtctgcagctcccgtgaagatgtccactccagacccacccctgggcggaactcctcggccaggtccttccccgggccctggcccttcccctggagccatgctgggccctagcccgggtccctcgccgggctccgcccacagcatgatggggcccagcccagggccgccctcagcaggacaccccatccccacccaggggcctggagggtaccctcaggacaacatgcaccagatgcacaagcccatggagtccatgcatgagaagggcatgtcggacgacccgcgctacaaccagatgaaaggaatggggatgcggtcagggggccatgctgggatggggcccccgcccagccccatggaccagcactcccaaggttacccctcgcccctgggtggctctgagcatgcctctagtccagttccagccagtggcccgtcttcggggccccagatgtcttccgggccaggaggtgccccgctggatggtgctgacccccaggccttggggcagcagaaccggggcccaaccccatttaaccagaaccagctgcaccagctcagagctcagatcatggcctacaagatgctggccagggggcagcccctccccgaccacctgcagatggcggtgcagggcaagcggccgatgcccgggatgcagcagcagatgccaacgctacctccaccctcggtgtccgcaacaggacccggccctggccctggccctggccccggcccgggtcccggcccggcacctccaaattacagcaggcctcatggtatgggagggcccaacatgcctcccccaggaccctcgggcgtgccccccgggatgccaggccagcctcctggagggcctcccaagccctggcctgaaggacccatggcgaatgctgctgcccccacgagcacccctcagaagctgattcccccgcagccaacgggccgcccttcccccgcgccccctgccgtcccacccgccgcctcgcccgtgatgccaccgcagacccagtcccccgggcagccggcccagcccgcgcccatggtgccactgcaccagaagcagagccgcatcacccccatccagaagccgcggggcctcgaccctgtggagatcctgcaggagcgcgagtacaggctgcaggctcgcatcgcacaccgaattcaggaacttgaaaaccttcccgggtccctggccggggatttgcgaaccaaagcgaccattgagctcaaggccctcaggctgctgaacttccagaggcagctgcgccaggaggtggtggtgtgcatgcggagggacacagcgctggagacagccctcaatgctaaggcctacaagcgcagcaagcgccagtccctgcgcgaggcccgcatcactgagaagctggagaagcagcagaagatcgagcaggagcgcaagcgccggcagaagcaccaggaatacctcaatagcattctccagcatgccaaggatttcaaggaatatcacagatccgtcacaggcaaaatccagaagctgaccaaggcagtggccacgtaccatgccaacacggagcgggagcagaagaaagagaacgagcggatcgagaaggagcgcatgcggaggctcatggctgaagatgaggaggggtaccgcaagctcatcgaccagaagaaggacaagcgcctggcctacctcttgcagcagacagacgagtacgtggctaacctcacggagctggtgcggcagcacaaggctgcccaggtcgccaaggagaaaaagaagaaaaagaaaaagaagaaggcagaaaatgcagaaggacagacgcctgccattgggccggatggcgagcctctggacgagaccagccagatgagcgacctcccggtgaaggtgatccacgtggagagtgggaagatcctcacaggcacagatgcccccaaagccgggcagctggaggcctggctcgagatgaacccggggtatgaagtagctccgaggtctgatagtgaagaaagtggctcagaagaagaggaagaggaggaggaggaagagcagccgcaggcagcacagcctcccaccctgcccgtggaggagaagaagaagattccagatccagacagcgatgacgtctctgaggtggacgcgcggcacatcattgagaatgccaagcaagatgtcgatgatgaatatggcgtgtcccaggcccttgcacgtggcctgcagtcctactatgccgtggcccatgctgtcactgagagagtggacaagcagtcagcgcttatggtcaatggtgtcctcaaacagtaccagatcaaaggtttggagtggctggtgtccctgtacaacaacaacctgaacggcatcctggccgacgagatgggcctggggaagaccatccagaccatcgcgctcatcacgtacctcatggagcacaaacgcatcaatgggcccttcctcatcatcgtgcctctctcaacgctgtccaactgggcgtacgagtttgacaagtgggccccctccgtggtgaaggtgtcttacaagggatccccagcagcaagacgggcctttgtcccccagctccggagtgggaagttcaacgtcttgctgacgacgtacgagtacatcatcaaagacaagcacatcctcgccaagatccgttggaagtacatgattgtggacgaaggtcaccgcatgaagaaccaccactgcaagctgacgcaggtgctcaacacgcactatgtggcaccccgccgcctgctgctgacgggcacaccgctgcagaacaagcttcccgagctctgggcgctgctcaacttcctgctgcccaccatcttcaagagctgcagcaccttcgagcagtggtttaacgcaccctttgccatgaccggggaaaaggtggacctgaatgaggaggaaaccattctcatcatccggcgtctccacaaagtgctgcggcccttcttgctccgacgactcaagaaggaagtcgaggcccagttgcccgaaaaggtggagtacgtcatcaagtgcgacatgtctgcgctgcagcgagtgctctaccgccacatgcaggccaagggcgtgctgctgactgatggctccgagaaggacaagaagggcaaaggcggcaccaagaccctgatgaacaccatcatgcagctgcggaagatctgcaaccacccctacatgttccagcacatcgaggagtccttttccgagcacttggggttcactggcggcattgtccaagggctggacctgtaccgagcctcgggtaaatttgagcttcttgatagaattcttcccaaactccgagcaaccaaccacaaagtgctgctgttctgccaaatgacctccctcatgaccatcatggaagattactttgcgtatcgcggctttaaatacctcaggcttgatggaaccacgaaggcggaggaccggggcatgctgctgaaaaccttcaacgagcccggctctgagtacttcatcttcctgctcagcacccgggctggggggctcggcctgaacctccagtcggcagacactgtgatcatttttgacagcgactggaatcctcaccaggacctgcaagcgcaggaccgagcccaccgcatcgggcagcagaacgaggtgcgtgtgctccgcctctgcaccgtcaacagcgtggaggagaagatcctagctgcagccaagtacaagctcaacgtggaccagaaggtgatccaggccggcatgttcgaccagaagtcctccagccatgagcggcgcgccttcctgcaggccatcctggagcacgaggagcaggatgagagcagacactgcagcacgggcagcggcagtgccagcttcgcccacactgcccctccgccagcgggcgtcaaccccgacttggaggagccacctctaaaggaggaagacgaggtgcccgacgacgagaccgtcaaccagatgatcgcccggcacgaggaggagtttgatctgttcatgcgcatggacctggaccgcaggcgcgaggaggcccgcaaccccaagcggaagccgcgcctcatggaggaggacgagctcccctcgtggatcatcaaggacgacgcggaggtggagcggctgacctgtgaggaggaggaggagaagatgttcggccgtggctcccgccaccgcaaggaggtggactacagcgactcactgacggagaagcagtggctcaaggccatcgaggagggcacgctggaggagatcgaagaggaggtccggcagaagaaatcatcacggaagcgcaagcgagacagcgacgccggctcctccaccccgaccaccagcacccgcagccgcgacaaggacgacgagagcaagaagcagaagaagcgcgggcggccgcctgccgagaaactctcccctaacccacccaacctcaccaagaagatgaagaagattgtggatgccgtgatcaagtacaaggacagcagcagtggacgtcagctcagcgaggtcttcatccagctgccctcgcgaaaggagctgcccgagtactacgagctcatccgcaagcccgtggacttcaagaagataaaggagcgcattcgcaaccacaagtaccgcagcctcaacgacctagagaaggacgtcatgctcctgtgccagaacgcacagaccttcaacctggagggctccctgatctatgaagactccatcgtcttgcagtcggtcttcaccagcgtgcggcagaaaatcgagaaggaggatgacagtgaaggcgaggagagtgaggaggaggaagagggcgaggaggaaggctccgaatccgaatctcggtccgtcaaagtgaagatcaagcttggccggaaggagaaggcacaggaccggctgaagggcggccggcggcggccgagccgagggtcccgagccaagccggtcgtgagtgacgatgacagtgaggaggaacaagaggaggaccgctcaggaagtggcagcgaagaagactgagccccgacattccagtctcgaccccgagcccctcgttccagagctgagatggcataggccttagcagtaacgggtagcagcagatgtagtttcagacttggagtaaaactgtataaacaaaagaatcttccatatttatacagcagagaagctgtaggactgtttgtgactggccctgtcctggcatcagtagcatctgtaacagcattaactgtcttaaagagagagagagagaattccgaattggggaacacacgatacctgtttttcttttccgttgctggcagtactgttgcgccgcagtttggagtcactgtagttaagtgtggatgcatgtgcgtcaccgtccactcctcctactgtattttattggacaggtcagactcgccgggggcccggcgagggtatgtcagtgtcactggatgtcaaacagtaataaattaaaccaacaacaaaacgcacagccaaaaaaaaa

SEQ ID NO: 195 - DNA, 5703 bp, Homo sapiens
ggagaggccgccgcggtgctgagggggaggggagccggcgagcgcgcgcgcagcgggggcgcgggtggcgcgcgtgtgtgtgaagggggggcggtggccgaggcgggcgggcgcgcgcgcgaggcttcccctcgtttggcggcggcggcggcttctttgtttcgtgaagagaagcgagacgcccattctgcccccggccccgcgcggaggggcgggggaggcgccgggaagtcgacggcgccggcggctcctgcaggaggccactgtctgcagctcccgtgaagatgtccactccagacccacccctgggcggaactcctcggccaggtccttccccgggccctggcccttcccctggagccatgctgggccctagcccgggtccctcgccgggctccgcccacagcatgatggggcccagcccagggccgccctcagcaggacaccccatccccacccaggggcctggagggtaccctcaggacaacatgcaccagatgcacaagcccatggagtccatgcatgagaagggcatgtcggacgacccgcgctacaaccagatgaaaggaatggggatgcggtcagggggccatgctgggatggggcccccgcccagccccatggaccagcactcccaaggttacccctcgcccctgggtggctctgagcatgcctctagtccagttccagccagtggcccgtcttcggggccccagatgtcttccgggccaggaggtgccccgctggatggtgctgacccccaggccttggggcagcagaaccggggcccaaccccatttaaccagaaccagctgcaccagctcagagctcagatcatggcctacaagatgctggccagggggcagcccctccccgaccacctgcagatggcggtgcagggcaagcggccgatgcccgggatgcagcagcagatgccaacgctacctccaccctcggtgtccgcaacaggacccggccctggccctggccctggccccggcccgggtcccggcccggcacctccaaattacagcaggcctcatggtatgggagggcccaacatgcctcccccaggaccctcgggcgtgccccccgggatgccaggccagcctcctggagggcctcccaagccctggcctgaaggacccatggcgaatgctgctgcccccacgagcacccctcagaagctgattcccccgcagccaacgggccgcccttcccccgcgccccctgccgtcccacccgccgcctcgcccgtgatgccaccgcagacccagtcccccgggcagccggcccagcccgcgcccatggtgccactgcaccagaagcagagccgcatcacccccatccagaagccgcggggcctcgaccctgtggagatcctgcaggagcgcgagtacaggctgcaggctcgcatcgcacaccgaattcaggaacttgaaaaccttcccgggtccctggccggggatttgcgaaccaaagcgaccattgagctcaaggccctcaggctgctgaacttccagaggcagctgcgccaggaggtggtggtgtgcatgcggagggacacagcgctggagacagccctcaatgctaaggcctacaagcgcagcaagcgccagtccctgcgcgaggcccgcatcactgagaagctggagaagcagcagaagatcgagcaggagcgcaagcgccggcagaagcaccaggaatacctcaatagcattctccagcatgccaaggatttcaaggaatatcacagatccgtcacaggcaaaatccagaagctgaccaaggcagtggccacgtaccatgccaacacggagcgggagcagaagaaagagaacgagcggatcgagaaggagcgcatgcggaggctcatggctgaagatgaggaggggtaccgcaagctcatcgaccagaagaaggacaagcgcctggcctacctcttgcagcagacagacgagtacgtggctaacctcacggagctggtgcggcagcacaaggctgcccaggtcgccaaggagaaaaagaagaaaaagaaaaagaagaaggcagaaaatgcagaaggacagacgcctgccattgggccggatggcgagcctctggacgagaccagccagatgagcgacctcccggtgaaggtgatccacgtggagagtgggaagatcctcacaggcacagatgcccccaaagccgggcagctggaggcctggctcgagatgaacccggggtatgaagtagctccgaggtctgatagtgaagaaagtggctcagaagaagaggaagaggaggaggaggaagagcagccgcaggcagcacagcctcccaccctgcccgtggaggagaagaagaagattccagatccagacagcgatgacgtctctgaggtggacgcgcggcacatcattgagaatgccaagcaagatgtcgatgatgaatatggcgtgtcccaggcccttgcacgtggcctgcagtcctactatgccgtggcccatgctgtcactgagagagtggacaagcagtcagcgcttatggtcaatggtgtcctcaaacagtaccagatcaaaggtttggagtggctggtgtccctgtacaacaacaacctgaacggcatcctggccgacgagatgggcctggggaagaccatccagaccatcgcgctcatcacgtacctcatggagcacaaacgcatcaatgggcccttcctcatcatcgtgcctctctcaacgctgtccaactgggcgtacgagtttgacaagtgggccccctccgtggtgaaggtgtcttacaagggatccccagcagcaagacgggcctttgtcccccagctccggagtgggaagttcaacgtcttgctgacgacgtacgagtacatcatcaaagacaagcacatcctcgccaagatccgttggaagtacatgattgtggacgaaggtcaccgcatgaagaaccaccactgcaagctgacgcaggtgctcaacacgcactatgtggcaccccgccgcctgctgctgacgggcacaccgctgcagaacaagcttcccgagctctgggcgctgctcaacttcctgctgcccaccatcttcaagagctgcagcaccttcgagcagtggtttaacgcaccctttgccatgaccggggaaaaggtggacctgaatgaggaggaaaccattctcatcatccggcgtctccacaaagtgctgcggcccttcttgctccgacgactcaagaaggaagtcgaggcccagttgcccgaaaaggtggagtacgtcatcaagtgcgacatgtctgcgctgcagcgagtgctctaccgccacatgcaggccaagggcgtgctgctgactgatggctccgagaaggacaagaagggcaaaggcggcaccaagaccctgatgaacaccatcatgcagctgcggaagatctgcaaccacccctacatgttccagcacatcgaggagtccttttccgagcacttggggttcactggcggcattgtccaagggctggacctgtaccgagcctcgggtaaatttgagcttcttgatagaattcttcccaaactccgagcaaccaaccacaaagtgctgctgttctgccaaatgacctccctcatgaccatcatggaagattactttgcgtatcgcggctttaaatacctcaggcttgatggaaccacgaaggcggaggaccggggcatgctgctgaaaaccttcaacgagcccggctctgagtacttcatcttcctgctcagcacccgggctggggggctcggcctgaacctccagtcggcagacactgtgatcatttttgacagcgactggaatcctcaccaggacctgcaagcgcaggaccgagcccaccgcatcgggcagcagaacgaggtgcgtgtgctccgcctctgcaccgtcaacagcgtggaggagaagatcctagctgcagccaagtacaagctcaacgtggaccagaaggtgatccaggccggcatgttcgaccagaagtcctccagccatgagcggcgcgccttcctgcaggccatcctggagcacgaggagcaggatgagagcagacactgcagcacgggcagcggcagtgccagcttcgcccacactgcccctccgccagcgggcgtcaaccccgacttggaggagccacctctaaaggaggaagacgaggtgcccgacgacgagaccgtcaaccagatgatcgcccggcacgaggaggagtttgatctgttcatgcgcatggacctggaccgcaggcgcgaggaggcccgcaaccccaagcggaagccgcgcctcatggaggaggacgagctcccctcgtggatcatcaaggacgacgcggaggtggagcggctgacctgtgaggaggaggaggagaagatgttcggccgtggctcccgccaccgcaaggaggtggactacagcgactcactgacggagaagcagtggctcaaggccatcgaggagggcacgctggaggagatcgaagaggaggtccggcagaagaaatcatcacggaagcgcaagcgagacagcgacgccggctcctccaccccgaccaccagcacccgcagccgcgacaaggacgacgagagcaagaagcagaagaagcgcgggcggccgcctgccgagaaactctcccctaacccacccaacctcaccaagaagatgaagaagattgtggatgccgtgatcaagtacaaggacagcagcagtggacgtcagctcagcgaggtcttcatccagctgccctcgcgaaaggagctgcccgagtactacgagctcatccgcaagcccgtggacttcaagaagataaaggagcgcattcgcaaccacaagtaccgcagcctcaacgacctagagaaggacgtcatgctcctgtgccagaacgcacagaccttcaacctggagggctccctgatctatgaagactccatcgtcttgcagtcggtcttcaccagcgtgcggcagaaaatcgagaaggaggatgacagtgaaggcgaggagagtgaggaggaggaagagggcgaggaggaaggctccgaatccgaatctcggtccgtcaaagtgaagatcaagcttggccggaaggagaaggcacaggaccggctgaagggcggccggcggcggccgagccgagggtcccgagccaagccggtcgtgagtgacgatgacagtgaggaggaacaagaggaggaccgctcaggaagtggcagcgaagaagactgagccccgacattccagtctcgaccccgagcccctcgttccagagctgagatggcataggccttagcagtaacgggtagcagcagatgtagtttcagacttggagtaaaactgtataaacaaaagaatcttccatatttatacagcagagaagctgtaggactgtttgtgactggccctgtcctggcatcagtagcatctgtaacagcattaactgtcttaaagagagagagagagaattccgaattggggaacacacgatacctgtttttcttttccgttgctggcagtactgttgcgccgcagtttggagtcactgtagttaagtgtggatgcatgtgcgtcaccgtccactcctcctactgtattttattggacaggtcagactcgccgggggcccggcgagggtatgtcagtgtcactggatgtcaaacagtaataaattaaaccaacaacaaaacgcacagccaaaaaaaaa

SEQ ID NO: 196 - protein, 1617 aa, Homo sapiens
MSTPDPPLGGTPRPGPSPGPGPSPGAMLGPSPGPSPGSAHSMMGPSPGPPSAGHPIPTQGPGGYPQDNMHQMHKPMESMHEKGMSDDPRYNQMKGMGMRSGGHAGMGPPPSPMDQHSQGYPSPLGGSEHASSPVPASGPSSGPQMSSGPGGAPLDGADPQALGQQNRGPTPFNQNQLHQLRAQIMAYKMLARGQPLPDHLQMAVQGKRPMPGMQQQMPTLPPPSVSATGPGPGPGPGPGPGPGPAPPNYSRPHGMGGPNMPPPGPSGVPPGMPGQPPGGPPKPWPEGPMANAAAPTSTPQKLIPPQPTGRPSPAPPAVPPAASPVMPPQTQSPGQPAQPAPMVPLHQKQSRITPIQKPRGLDPVEILQEREYRLQARIAHRIQELENLPGSLAGDLRTKATIELKALRLLNFQRQLRQEVVVCMRRDTALETALNAKAYKRSKRQSLREARITEKLEKQQKIEQERKRRQKHQEYLNSILQHAKDFKEYHRSVTGKIQKLTKAVATYHANTEREQKKENERIEKERMRRLMAEDEEGYRKLIDQKKDKRLAYLLQQTDEYVANLTELVRQHKAAQVAKEKKKKKKKKKAENAEGQTPAIGPDGEPLDETSQMSDLPVKVIHVESGKILTGTDAPKAGQLEAWLEMNPGYEVAPRSDSEESGSEEEEEEEEEEQPQAAQPPTLPVEEKKKIPDPDSDDVSEVDARHIIENAKQDVDDEYGVSQALARGLQSYYAVAHAVTERVDKQSALMVNGVLKQYQIKGLEWLVSLYNNNLNGILADEMGLGKTIQTIALITYLMEHKRINGPFLIIVPLSTLSNWAYEFDKWAPSVVKVSYKGSPAARRAFVPQLRSGKFNVLLTTYEYIIKDKHILAKIRWKYMIVDEGHRMKNHHCKLTQVLNTHYVAPRRLLLTGTPLQNKLPELWALLNFLLPTIFKSCSTFEQWFNAPFAMTGEKVDLNEEETILIIRRLHKVLRPFLLRRLKKEVEAQLPEKVEYVIKCDMSALQRVLYRHMQAKGVLLTDGSEKDKKGKGGTKTLMNTIMQLRKICNHPYMFQHIEESFSEHLGFTGGIVQGLDLYRASGKFELLDRILPKLRATNHKVLLFCQMTSLMTIMEDYFAYRGFKYLRLDGTTKAEDRGMLLKTFNEPGSEYFIFLLSTRAGGLGLNLQSADTVIIFDSDWNPHQDLQAQDRAHRIGQQNEVRVLRLCTVNSVEEKILAAAKYKLNVDQKVIQAGMFDQKSSSHERRAFLQAILEHEEQDEEEDEVPDDETVNQMIARHEEEFDLFMRMDLDRRREEARNPKRKPRLMEEDELPSWIIKDDAEVERLTCEEEEEKMFGRGSRHRKEVDYSDSLTEKQWLKTLKAIEEGTLEEIEEEVRQKKSSRKRKRDSDAGSSTPTTSTRSRDKDDESKKQKKRGRPPAEKLSPNPPNLTKKMKKIVDAVIKYKDSSSGRQLSEVFIQLPSRKELPEYYELIRKPVDFKKIKERIRNHKYRSLNDLEKDVMLLCQNAQTFNLEGSLIYEDSIVLQSVFTSVRQKIEKEDDSEGEESEEEEEGEEEGSESESRSVKVKIKLGRKEKAQDRLKGGRRRPSRGSRAKPVVSDDDSEEEQEEDRSGSGSEED

SEQ ID NO: 197 - DNA, 5329 bp, Homo sapiens
atgtccactccagacccacccctgggcggaactcctcggccaggtccttccccgggccctggcccttcccctggagccatgctgggccctagcccgggtccctcgccgggctccgcccacagcatgatggggcccagcccagggccgccctcagcaggacaccccatccccacccaggggcctggagggtaccctcaggacaacatgcaccagatgcacaagcccatggagtccatgcatgagaagggcatgtcggacgacccgcgctacaaccagatgaaaggaatggggatgcggtcagggggccatgctgggatggggcccccgcccagccccatggaccagcactcccaaggttacccctcgcccctgggtggctctgagcatgcctctagtccagttccagccagtggcccgtcttcggggccccagatgtcttccgggccaggaggtgccccgctggatggtgctgacccccaggccttggggcagcagaaccggggcccaaccccatttaaccagaaccagctgcaccagctcagagctcagatcatggcctacaagatgctggccagggggcagcccctccccgaccacctgcagatggcggtgcagggcaagcggccgatgcccgggatgcagcagcagatgccaacgctacctccaccctcggtgtccgcaacaggacccggccctggccctggccctggccccggcccgggtcccggcccggcacctccaaattacagcaggcctcatggtatgggagggcccaacatgcctcccccaggaccctcgggcgtgccccccgggatgccaggccagcctcctggagggcctcccaagccctggcctgaaggacccatggcgaatgctgctgcccccacgagcacccctcagaagctgattcccccgcagccaacgggccgcccttcccccgcgccccctgccgtcccacccgccgcctcgcccgtgatgccaccgcagacccagtcccccgggcagccggcccagcccgcgcccatggtgccactgcaccagaagcagagccgcatcacccccatccagaagccgcggggcctcgaccctgtggagatcctgcaggagcgcgagtacaggctgcaggctcgcatcgcacaccgaattcaggaacttgaaaaccttcccgggtccctggccggggatttgcgaaccaaagcgaccattgagctcaaggccctcaggctgctgaacttccagaggcagctgcgccaggaggtggtggtgtgcatgcggagggacacagcgctggagacagccctcaatgctaaggcctacaagcgcagcaagcgccagtccctgcgcgaggcccgcatcactgagaagctggagaagcagcagaagatcgagcaggagcgcaagcgccggcagaagcaccaggaatacctcaatagcattctccagcatgccaaggatttcaaggaatatcacagatccgtcacaggcaaaatccagaagctgaccaaggcagtggccacgtaccatgccaacacggagcgggagcagaagaaagagaacgagcggatcgagaaggagcgcatgcggaggctcatggctgaagatgaggaggggtaccgcaagctcatcgaccagaagaaggacaagcgcctggcctacctcttgcagcagacagacgagtacgtggctaacctcacggagctggtgcggcagcacaaggctgcccaggtcgccaaggagaaaaagaagaaaaagaaaaagaagaaggcagaaaatgcagaaggacagacgcctgccattgggccggatggcgagcctctggacgagaccagccagatgagcgacctcccggtgaaggtgatccacgtggagagtgggaagatcctcacaggcacagatgcccccaaagccgggcagctggaggcctggctcgagatgaacccggggtatgaagtagctccgaggtctgatagtgaagaaagtggctcagaagaagaggaagaggaggaggaggaagagcagccgcaggcagcacagcctcccaccctgcccgtggaggagaagaagaagattccagatccagacagcgatgacgtctctgaggtggacgcgcggcacatcattgagaatgccaagcaagatgtcgatgatgaatatggcgtgtcccaggcccttgcacgtggcctgcagtcctactatgccgtggcccatgctgtcactgagagagtggacaagcagtcagcgcttatggtcaatggtgtcctcaaacagtaccagatcaaaggtttggagtggctggtgtccctgtacaacaacaacctgaacggcatcctggccgacgagatgggcctggggaagaccatccagaccatcgcgctcatcacgtacctcatggagcacaaacgcatcaatgggcccttcctcatcatcgtgcctctctcaacgctgtccaactgggcgtacgagtttgacaagtgggccccctccgtggtgaaggtgtcttacaagggatccccagcagcaagacgggcctttgtcccccagctccggagtgggaagttcaacgtcttgctgacgacgtacgagtacatcatcaaagacaagcacatcctcgccaagatccgttggaagtacatgattgtggacgaaggtcaccgcatgaagaaccaccactgcaagctgacgcaggtgctcaacacgcactatgtggcaccccgccgcctgctgctgacgggcacaccgctgcagaacaagcttcccgagctctgggcgctgctcaacttcctgctgcccaccatcttcaagagctgcagcaccttcgagcagtggtttaacgcaccctttgccatgaccggggaaaaggtggacctgaatgaggaggaaaccattctcatcatccggcgtctccacaaagtgctgcggcccttcttgctccgacgactcaagaaggaagtcgaggcccagttgcccgaaaaggtggagtacgtcatcaagtgcgacatgtctgcgctgcagcgagtgctctaccgccacatgcaggccaagggcgtgctgctgactgatggctccgagaaggacaagaagggcaaaggcggcaccaagaccctgatgaacaccatcatgcagctgcggaagatctgcaaccacccctacatgttccagcacatcgaggagtccttttccgagcacttggggttcactggcggcattgtccaagggctggacctgtaccgagcctcgggtaaatttgagcttcttgatagaattcttcccaaactccgagcaaccaaccacaaagtgctgctgttctgccaaatgacctccctcatgaccatcatggaagattactttgcgtatcgcggctttaaatacctcaggcttgatggaaccacgaaggcggaggaccggggcatgctgctgaaaaccttcaacgagcccggctctgagtacttcatcttcctgctcagcacccgggctggggggctcggcctgaacctccagtcggcagacactgtgatcatttttgacagcgactggaatcctcaccaggacctgcaagcgcaggaccgagcccaccgcatcgggcagcagaacgaggtgcgtgtgctccgcctctgcaccgtcaacagcgtggaggagaagatcctagctgcagccaagtacaagctcaacgtggaccagaaggtgatccaggccggcatgttcgaccagaagtcctccagccatgagcggcgcgccttcctgcaggccatcctggagcacgaggagcaggatgaggaggaagacgaggtgcccgacgacgagaccgtcaaccagatgatcgcccggcacgaggaggagtttgatctgttcatgcgcatggacctggaccgcaggcgcgaggaggcccgcaaccccaagcggaagccgcgcctcatggaggaggacgagctcccctcgtggatcatcaaggacgacgcggaggtggagcggctgacctgtgaggaggaggaggagaagatgttcggccgtggctcccgccaccgcaaggaggtggactacagcgactcactgacggagaagcagtggctcaagaccctgaaggccatcgaggagggcacgctggaggagatcgaagaggaggtccggcagaagaaatcatcacggaagcgcaagcgagacagcgacgccggctcctccaccccgaccaccagcacccgcagccgcgacaaggacgacgagagcaagaagcagaagaagcgcgggcggccgcctgccgagaaactctcccctaacccacccaacctcaccaagaagatgaagaagattgtggatgccgtgatcaagtacaaggacagcagcagtggacgtcagctcagcgaggtcttcatccagctgccctcgcgaaaggagctgcccgagtactacgagctcatccgcaagcccgtggacttcaagaagataaaggagcgcattcgcaaccacaagtaccgcagcctcaacgacctagagaaggacgtcatgctcctgtgccagaacgcacagaccttcaacctggagggctccctgatctatgaagactccatcgtcttgcagtcggtcttcaccagcgtgcggcagaaaatcgagaaggaggatgacagtgaaggcgaggagagtgaggaggaggaagagggcgaggaggaaggctccgaatccgaatctcggtccgtcaaagtgaagatcaagcttggccggaaggagaaggcacaggaccggctgaagggcggccggcggcggccgagccgagggtcccgagccaagccggtcgtgagtgacgatgacagtgaggaggaacaagaggaggaccgctcaggaagtggcagcgaagaagactgagccccgacattccagtctcgaccccgagcccctcgttccagagctgagatggcataggccttagcagtaacgggtagcagcagatgtagtttcagacttggagtaaaactgtataaacaaaagaatcttccatatttatacagcagagaagctgtaggactgtttgtgactggccctgtcctggcatcagtagcatctgtaacagcattaactgtcttaaagagagagagagagaattccgaattggggaacacacgatacctgtttttcttttccgttgctggcagtactgttgcgccgcagtttggagtcactgtagttaagtgtggatgcatgtgcgtcaccgtccactcctcctactgtattttattggacaggtcagactcgccgggggcccggcgagggtatgtcagtgtcactggatgtcaaacagtaataaattaaaccaacaacaaaacgcacagccaaaaaaaaa

SEQ ID NO: 198 - protein, 1616 aa, Homo sapiens
MSTPDPPLGGTPRPGPSPGPGPSPGAMLGPSPGPSPGSAHSMMGPSPGPPSAGHPIPTQGPGGYPQDNMHQMHKPMESMHEKGMSDDPRYNQMKGMGMRSGGHAGMGPPPSPMDQHSQGYPSPLGGSEHASSPVPASGPSSGPQMSSGPGGAPLDGADPQALGQQNRGPTPFNQNQLHQLRAQIMAYKMLARGQPLPDHLQMAVQGKRPMPGMQQQMPTLPPPSVSATGPGPGPGPGPGPGPGPAPPNYSRPHGMGGPNMPPPGPSGVPPGMPGQPPGGPPKPWPEGPMANAAAPTSTPQKLIPPQPTGRPSPAPPAVPPAASPVMPPQTQSPGQPAQPAPMVPLHQKQSRITPIQKPRGLDPVEILQEREYRLQARIAHRIQELENLPGSLAGDLRTKATIELKALRLLNFQRQLRQEVVVCMRRDTALETALNAKAYKRSKRQSLREARITEKLEKQQKIEQERKRRQKHQEYLNSILQHAKDFKEYHRSVTGKIQKLTKAVATYHANTEREQKKENERIEKERMRRLMAEDEEGYRKLIDQKKDKRLAYLLQQTDEYVANLTELVRQHKAAQVAKEKKKKKKKKKAENAEGQTPAIGPDGEPLDETSQMSDLPVKVIHVESGKILTGTDAPKAGQLEAWLEMNPGYEVAPRSDSEESGSEEEEEEEEEEQPQAAQPPTLPVEEKKKIPDPDSDDVSEVDARHIIENAKQDVDDEYGVSQALARGLQSYYAVAHAVTERVDKQSALMVNGVLKQYQIKGLEWLVSLYNNNLNGILADEMGLGKTIQTIALITYLMEHKRINGPFLIIVPLSTLSNWAYEFDKWAPSVVKVSYKGSPAARRAFVPQLRSGKFNVLLTTYEYIIKDKHILAKIRWKYMIVDEGHRMKNHHCKLTQVLNTHYVAPRRLLLTGTPLQNKLPELWALLNFLLPTIFKSCSTFEQWFNAPFAMTGEKVDLNEEETILIIRRLHKVLRPFLLRRLKKEVEAQLPEKVEYVIKCDMSALQRVLYRHMQAKGVLLTDGSEKDKKGKGGTKTLMNTIMQLRKICNHPYMFQHIEESFSEHLGFTGGIVQGLDLYRASGKFELLDRILPKLRATNHKVLLFCQMTSLMTIMEDYFAYRGFKYLRLDGTTKAEDRGMLLKTFNEPGSEYFIFLLSTRAGGLGLNLQSADTVIIFDSDWNPHQDLQAQDRAHRIGQQNEVRVLRLCTVNSVEEKILAAAKYKLNVDQKVIQAGMFDQKSSSHERRAFLQAILEHEEQDEEEDEVPDDETVNQMIARHEEEFDLFMRMDLDRRREEARNPKRKPRLMEEDELPSWIIKDDAEVERLTCEEEEEKMFGRGSRHRKEVDYSDSLTEKQWLKTLKAIEEGTLEEIEEEVRQKKSSRKRKRDSDAGSSTPTTSTRSRDKDDESKKQKKRGRPPAEKLSPNPPNLTKKMKKIVDAVIKYKDSSGRQLSEVFIQLPSRKELPEYYELIRKPVDFKKIKERIRNHKYRSLNDLEKDVMLLCQNAQTFNLEGSLIYEDSIVLQSVFTSVRQKIEKEDDSEGEESEEEEEGEEEGSESESRSVKVKIKLGRKEKAQDRLKGGRRRPSRGSRAKPVVSDDDSEEEQEEDRSGSGSEED

SEQ ID NO: 199 - DNA, 5326 bp, Homo sapiens
atgtccactccagacccacccctgggcggaactcctcggccaggtccttccccgggccctggcccttcccctggagccatgctgggccctagcccgggtccctcgccgggctccgcccacagcatgatggggcccagcccagggccgccctcagcaggacaccccatccccacccaggggcctggagggtaccctcaggacaacatgcaccagatgcacaagcccatggagtccatgcatgagaagggcatgtcggacgacccgcgctacaaccagatgaaaggaatggggatgcggtcagggggccatgctgggatggggcccccgcccagccccatggaccagcactcccaaggttacccctcgcccctgggtggctctgagcatgcctctagtccagttccagccagtggcccgtcttcggggccccagatgtcttccgggccaggaggtgccccgctggatggtgctgacccccaggccttggggcagcagaaccggggcccaaccccatttaaccagaaccagctgcaccagctcagagctcagatcatggcctacaagatgctggccagggggcagcccctccccgaccacctgcagatggcggtgcagggcaagcggccgatgcccgggatgcagcagcagatgccaacgctacctccaccctcggtgtccgcaacaggacccggccctggccctggccctggccccggcccgggtcccggcccggcacctccaaattacagcaggcctcatggtatgggagggcccaacatgcctcccccaggaccctcgggcgtgccccccgggatgccaggccagcctcctggagggcctcccaagccctggcctgaaggacccatggcgaatgctgctgcccccacgagcacccctcagaagctgattcccccgcagccaacgggccgcccttcccccgcgccccctgccgtcccacccgccgcctcgcccgtgatgccaccgcagacccagtcccccgggcagccggcccagcccgcgcccatggtgccactgcaccagaagcagagccgcatcacccccatccagaagccgcggggcctcgaccctgtggagatcctgcaggagcgcgagtacaggctgcaggctcgcatcgcacaccgaattcaggaacttgaaaaccttcccgggtccctggccggggatttgcgaaccaaagcgaccattgagctcaaggccctcaggctgctgaacttccagaggcagctgcgccaggaggtggtggtgtgcatgcggagggacacagcgctggagacagccctcaatgctaaggcctacaagcgcagcaagcgccagtccctgcgcgaggcccgcatcactgagaagctggagaagcagcagaagatcgagcaggagcgcaagcgccggcagaagcaccaggaatacctcaatagcattctccagcatgccaaggatttcaaggaatatcacagatccgtcacaggcaaaatccagaagctgaccaaggcagtggccacgtaccatgccaacacggagcgggagcagaagaaagagaacgagcggatcgagaaggagcgcatgcggaggctcatggctgaagatgaggaggggtaccgcaagctcatcgaccagaagaaggacaagcgcctggcctacctcttgcagcagacagacgagtacgtggctaacctcacggagctggtgcggcagcacaaggctgcccaggtcgccaaggagaaaaagaagaaaaagaaaaagaagaaggcagaaaatgcagaaggacagacgcctgccattgggccggatggcgagcctctggacgagaccagccagatgagcgacctcccggtgaaggtgatccacgtggagagtgggaagatcctcacaggcacagatgcccccaaagccgggcagctggaggcctggctcgagatgaacccggggtatgaagtagctccgaggtctgatagtgaagaaagtggctcagaagaagaggaagaggaggaggaggaagagcagccgcaggcagcacagcctcccaccctgcccgtggaggagaagaagaagattccagatccagacagcgatgacgtctctgaggtggacgcgcggcacatcattgagaatgccaagcaagatgtcgatgatgaatatggcgtgtcccaggcccttgcacgtggcctgcagtcctactatgccgtggcccatgctgtcactgagagagtggacaagcagtcagcgcttatggtcaatggtgtcctcaaacagtaccagatcaaaggtttggagtggctggtgtccctgtacaacaacaacctgaacggcatcctggccgacgagatgggcctggggaagaccatccagaccatcgcgctcatcacgtacctcatggagcacaaacgcatcaatgggcccttcctcatcatcgtgcctctctcaacgctgtccaactgggcgtacgagtttgacaagtgggccccctccgtggtgaaggtgtcttacaagggatccccagcagcaagacgggcctttgtcccccagctccggagtgggaagttcaacgtcttgctgacgacgtacgagtacatcatcaaagacaagcacatcctcgccaagatccgttggaagtacatgattgtggacgaaggtcaccgcatgaagaaccaccactgcaagctgacgcaggtgctcaacacgcactatgtggcaccccgccgcctgctgctgacgggcacaccgctgcagaacaagcttcccgagctctgggcgctgctcaacttcctgctgcccaccatcttcaagagctgcagcaccttcgagcagtggtttaacgcaccctttgccatgaccggggaaaaggtggacctgaatgaggaggaaaccattctcatcatccggcgtctccacaaagtgctgcggcccttcttgctccgacgactcaagaaggaagtcgaggcccagttgcccgaaaaggtggagtacgtcatcaagtgcgacatgtctgcgctgcagcgagtgctctaccgccacatgcaggccaagggcgtgctgctgactgatggctccgagaaggacaagaagggcaaaggcggcaccaagaccctgatgaacaccatcatgcagctgcggaagatctgcaaccacccctacatgttccagcacatcgaggagtccttttccgagcacttggggttcactggcggcattgtccaagggctggacctgtaccgagcctcgggtaaatttgagcttcttgatagaattcttcccaaactccgagcaaccaaccacaaagtgctgctgttctgccaaatgacctccctcatgaccatcatggaagattactttgcgtatcgcggctttaaatacctcaggcttgatggaaccacgaaggcggaggaccggggcatgctgctgaaaaccttcaacgagcccggctctgagtacttcatcttcctgctcagcacccgggctggggggctcggcctgaacctccagtcggcagacactgtgatcatttttgacagcgactggaatcctcaccaggacctgcaagcgcaggaccgagcccaccgcatcgggcagcagaacgaggtgcgtgtgctccgcctctgcaccgtcaacagcgtggaggagaagatcctagctgcagccaagtacaagctcaacgtggaccagaaggtgatccaggccggcatgttcgaccagaagtcctccagccatgagcggcgcgccttcctgcaggccatcctggagcacgaggagcaggatgaggaggaagacgaggtgcccgacgacgagaccgtcaaccagatgatcgcccggcacgaggaggagtttgatctgttcatgcgcatggacctggaccgcaggcgcgaggaggcccgcaaccccaagcggaagccgcgcctcatggaggaggacgagctcccctcgtggatcatcaaggacgacgcggaggtggagcggctgacctgtgaggaggaggaggagaagatgttcggccgtggctcccgccaccgcaaggaggtggactacagcgactcactgacggagaagcagtggctcaagaccctgaaggccatcgaggagggcacgctggaggagatcgaagaggaggtccggcagaagaaatcatcacggaagcgcaagcgagacagcgacgccggctcctccaccccgaccaccagcacccgcagccgcgacaaggacgacgagagcaagaagcagaagaagcgcgggcggccgcctgccgagaaactctcccctaacccacccaacctcaccaagaagatgaagaagattgtggatgccgtgatcaagtacaaggacagcagtggacgtcagctcagcgaggtcttcatccagctgccctcgcgaaaggagctgcccgagtactacgagctcatccgcaagcccgtggacttcaagaagataaaggagcgcattcgcaaccacaagtaccgcagcctcaacgacctagagaaggacgtcatgctcctgtgccagaacgcacagaccttcaacctggagggctccctgatctatgaagactccatcgtcttgcagtcggtcttcaccagcgtgcggcagaaaatcgagaaggaggatgacagtgaaggcgaggagagtgaggaggaggaagagggcgaggaggaaggctccgaatccgaatctcggtccgtcaaagtgaagatcaagcttggccggaaggagaaggcacaggaccggctgaagggcggccggcggcggccgagccgagggtcccgagccaagccggtcgtgagtgacgatgacagtgaggaggaacaagaggaggaccgctcaggaagtggcagcgaagaagactgagccccgacattccagtctcgaccccgagcccctcgttccagagctgagatggcataggccttagcagtaacgggtagcagcagatgtagtttcagacttggagtaaaactgtataaacaaaagaatcttccatatttatacagcagagaagctgtaggactgtttgtgactggccctgtcctggcatcagtagcatctgtaacagcattaactgtcttaaagagagagagagagaattccgaattggggaacacacgatacctgtttttcttttccgttgctggcagtactgttgcgccgcagtttggagtcactgtagttaagtgtggatgcatgtgcgtcaccgtccactcctcctactgtattttattggacaggtcagactcgccgggggcccggcgagggtatgtcagtgtcactggatgtcaaacagtaataaattaaaccaacaacaaaacgcacagccaaaaaaaaa

SEQ ID NO: 200 - protein, 1614 aa, Homo sapiens
MSTPDPPLGGTPRPGPSPGPGPSPGAMLGPSPGPSPGSAHSMMGPSPGPPSAGHPIPTQGPGGYPQDNMHQMHKPMESMHEKGMSDDPRYNQMKGMGMRSGGHAGMGPPPSPMDQHSQGYPSPLGGSEHASSPVPASGPSSGPQMSSGPGGAPLDGADPQALGQQNRGPTPFNQNQLHQLRAQIMAYKMLARGQPLPDHLQMAVQGKRPMPGMQQQMPTLPPPSVSATGPGPGPGPGPGPGPGPAPPNYSRPHGMGGPNMPPPGPSGVPPGMPGQPPGGPPKPWPEGPMANAAAPTSTPQKLIPPQPTGRPSPAPPAVPPAASPVMPPQTQSPGQPAQPAPMVPLHQKQSRITPIQKPRGLDPVEILQEREYRLQARIAHRIQELENLPGSLAGDLRTKATIELKALRLLNFQRQLRQEVVVCMRRDTALETALNAKAYKRSKRQSLREARITEKLEKQQKIEQERKRRQKHQEYLNSILQHAKDFKEYHRSVTGKIQKLTKAVATYHANTEREQKKENERIEKERMRRLMAEDEEGYRKLIDQKKDKRLAYLLQQTDEYVANLTELVRQHKAAQVAKEKKKKKKKKKAENAEGQTPAIGPDGEPLDETSQMSDLPVKVIHVESGKILTGTDAPKAGQLEAWLEMNPGYEVAPRSDSEESGSEEEEEEEEEEQPQAAQPPTLPVEEKKKIPDPDSDDVSEVDARHIIENAKQDVDDEYGVSQALARGLQSYYAVAHAVTERVDKQSALMVNGVLKQYQIKGLEWLVSLYNNNLNGILADEMGLGKTIQTIALITYLMEHKRINGPFLIIVPLSTLSNWAYEFDKWAPSVVKVSYKGSPAARRAFVPQLRSGKFNVLLTTYEYIIKDKHILAKIRWKYMIVDEGHRMKNHHCKLTQVLNTHYVAPRRLLLTGTPLQNKLPELWALLNFLLPTIFKSCSTFEQWFNAPFAMTGEKVDLNEEETILIIRRLHKVLRPFLLRRLKKEVEAQLPEKVEYVIKCDMSALQRVLYRHMQAKGVLLTDGSEKDKKGKGGTKTLMNTIMQLRKICNHPYMFQHIEESFSEHLGFTGGIVQGLDLYRASGKFELLDRILPKLRATNHKVLLFCQMTSLMTIMEDYFAYRGFKYLRLDGTTKAEDRGMLLKTFNEPGSEYFIFLLSTRAGGLGLNLQSADTVIIFDSDWNPHQDLQAQDRAHRIGQQNEVRVLRLCTVNSVEEKILAAAKYKLNVDQKVIQAGMFDQKSSSHERRAFLQAILEHEEQDEEEDEVPDDETVNQMIARHEEEFDLFMRMDLDRRREEARNPKRKPRLMEEDELPSWIIKDDAEVERLTCEEEEEKMFGRGSRHRKEVDYSDSLTEKQWLKAIEEGTLEEIEEEVRQKKSSRKRKRDSDAGSSTPTTSTRSRDKDDESKKQKKRGRPPAEKLSPNPPNLTKKMKKIVDAVIKYKDSSSGRQLSEVFIQLPSRKELPEYYELIRKPVDFKKIKERIRNHKYRSLNDLEKDVMLLCQNAQTFNLEGSLIYEDSIVLQSVFTSVRQKIEKEDDSEGEESEEEEEGEEEGSESESRSVKVKIKLGRKEKAQDRLKGGRRRPSRGSRAKPVVSDDDSEEEQEEDRSGSGSEED

SEQ ID NO: 201 - DNA, 5320 bp, Homo sapiens
atgtccactccagacccacccctgggcggaactcctcggccaggtccttccccgggccctggcccttcccctggagccatgctgggccctagcccgggtccctcgccgggctccgcccacagcatgatggggcccagcccagggccgccctcagcaggacaccccatccccacccaggggcctggagggtaccctcaggacaacatgcaccagatgcacaagcccatggagtccatgcatgagaagggcatgtcggacgacccgcgctacaaccagatgaaaggaatggggatgcggtcagggggccatgctgggatggggcccccgcccagccccatggaccagcactcccaaggttacccctcgcccctgggtggctctgagcatgcctctagtccagttccagccagtggcccgtcttcggggccccagatgtcttccgggccaggaggtgccccgctggatggtgctgacccccaggccttggggcagcagaaccggggcccaaccccatttaaccagaaccagctgcaccagctcagagctcagatcatggcctacaagatgctggccagggggcagcccctccccgaccacctgcagatggcggtgcagggcaagcggccgatgcccgggatgcagcagcagatgccaacgctacctccaccctcggtgtccgcaacaggacccggccctggccctggccctggccccggcccgggtcccggcccggcacctccaaattacagcaggcctcatggtatgggagggcccaacatgcctcccccaggaccctcgggcgtgccccccgggatgccaggccagcctcctggagggcctcccaagccctggcctgaaggacccatggcgaatgctgctgcccccacgagcacccctcagaagctgattcccccgcagccaacgggccgcccttcccccgcgccccctgccgtcccacccgccgcctcgcccgtgatgccaccgcagacccagtcccccgggcagccggcccagcccgcgcccatggtgccactgcaccagaagcagagccgcatcacccccatccagaagccgcggggcctcgaccctgtggagatcctgcaggagcgcgagtacaggctgcaggctcgcatcgcacaccgaattcaggaacttgaaaaccttcccgggtccctggccggggatttgcgaaccaaagcgaccattgagctcaaggccctcaggctgctgaacttccagaggcagctgcgccaggaggtggtggtgtgcatgcggagggacacagcgctggagacagccctcaatgctaaggcctacaagcgcagcaagcgccagtccctgcgcgaggcccgcatcactgagaagctggagaagcagcagaagatcgagcaggagcgcaagcgccggcagaagcaccaggaatacctcaatagcattctccagcatgccaaggatttcaaggaatatcacagatccgtcacaggcaaaatccagaagctgaccaaggcagtggccacgtaccatgccaacacggagcgggagcagaagaaagagaacgagcggatcgagaaggagcgcatgcggaggctcatggctgaagatgaggaggggtaccgcaagctcatcgaccagaagaaggacaagcgcctggcctacctcttgcagcagacagacgagtacgtggctaacctcacggagctggtgcggcagcacaaggctgcccaggtcgccaaggagaaaaagaagaaaaagaaaaagaagaaggcagaaaatgcagaaggacagacgcctgccattgggccggatggcgagcctctggacgagaccagccagatgagcgacctcccggtgaaggtgatccacgtggagagtgggaagatcctcacaggcacagatgcccccaaagccgggcagctggaggcctggctcgagatgaacccggggtatgaagtagctccgaggtctgatagtgaagaaagtggctcagaagaagaggaagaggaggaggaggaagagcagccgcaggcagcacagcctcccaccctgcccgtggaggagaagaagaagattccagatccagacagcgatgacgtctctgaggtggacgcgcggcacatcattgagaatgccaagcaagatgtcgatgatgaatatggcgtgtcccaggcccttgcacgtggcctgcagtcctactatgccgtggcccatgctgtcactgagagagtggacaagcagtcagcgcttatggtcaatggtgtcctcaaacagtaccagatcaaaggtttggagtggctggtgtccctgtacaacaacaacctgaacggcatcctggccgacgagatgggcctggggaagaccatccagaccatcgcgctcatcacgtacctcatggagcacaaacgcatcaatgggcccttcctcatcatcgtgcctctctcaacgctgtccaactgggcgtacgagtttgacaagtgggccccctccgtggtgaaggtgtcttacaagggatccccagcagcaagacgggcctttgtcccccagctccggagtgggaagttcaacgtcttgctgacgacgtacgagtacatcatcaaagacaagcacatcctcgccaagatccgttggaagtacatgattgtggacgaaggtcaccgcatgaagaaccaccactgcaagctgacgcaggtgctcaacacgcactatgtggcaccccgccgcctgctgctgacgggcacaccgctgcagaacaagcttcccgagctctgggcgctgctcaacttcctgctgcccaccatcttcaagagctgcagcaccttcgagcagtggtttaacgcaccctttgccatgaccggggaaaaggtggacctgaatgaggaggaaaccattctcatcatccggcgtctccacaaagtgctgcggcccttcttgctccgacgactcaagaaggaagtcgaggcccagttgcccgaaaaggtggagtacgtcatcaagtgcgacatgtctgcgctgcagcgagtgctctaccgccacatgcaggccaagggcgtgctgctgactgatggctccgagaaggacaagaagggcaaaggcggcaccaagaccctgatgaacaccatcatgcagctgcggaagatctgcaaccacccctacatgttccagcacatcgaggagtccttttccgagcacttggggttcactggcggcattgtccaagggctggacctgtaccgagcctcgggtaaatttgagcttcttgatagaattcttcccaaactccgagcaaccaaccacaaagtgctgctgttctgccaaatgacctccctcatgaccatcatggaagattactttgcgtatcgcggctttaaatacctcaggcttgatggaaccacgaaggcggaggaccggggcatgctgctgaaaaccttcaacgagcccggctctgagtacttcatcttcctgctcagcacccgggctggggggctcggcctgaacctccagtcggcagacactgtgatcatttttgacagcgactggaatcctcaccaggacctgcaagcgcaggaccgagcccaccgcatcgggcagcagaacgaggtgcgtgtgctccgcctctgcaccgtcaacagcgtggaggagaagatcctagctgcagccaagtacaagctcaacgtggaccagaaggtgatccaggccggcatgttcgaccagaagtcctccagccatgagcggcgcgccttcctgcaggccatcctggagcacgaggagcaggatgaggaggaagacgaggtgcccgacgacgagaccgtcaaccagatgatcgcccggcacgaggaggagtttgatctgttcatgcgcatggacctggaccgcaggcgcgaggaggcccgcaaccccaagcggaagccgcgcctcatggaggaggacgagctcccctcgtggatcatcaaggacgacgcggaggtggagcggctgacctgtgaggaggaggaggagaagatgttcggccgtggctcccgccaccgcaaggaggtggactacagcgactcactgacggagaagcagtggctcaaggccatcgaggagggcacgctggaggagatcgaagaggaggtccggcagaagaaatcatcacggaagcgcaagcgagacagcgacgccggctcctccaccccgaccaccagcacccgcagccgcgacaaggacgacgagagcaagaagcagaagaagcgcgggcggccgcctgccgagaaactctcccctaacccacccaacctcaccaagaagatgaagaagattgtggatgccgtgatcaagtacaaggacagcagcagtggacgtcagctcagcgaggtcttcatccagctgccctcgcgaaaggagctgcccgagtactacgagctcatccgcaagcccgtggacttcaagaagataaaggagcgcattcgcaaccacaagtaccgcagcctcaacgacctagagaaggacgtcatgctcctgtgccagaacgcacagaccttcaacctggagggctccctgatctatgaagactccatcgtcttgcagtcggtcttcaccagcgtgcggcagaaaatcgagaaggaggatgacagtgaaggcgaggagagtgaggaggaggaagagggcgaggaggaaggctccgaatccgaatctcggtccgtcaaagtgaagatcaagcttggccggaaggagaaggcacaggaccggctgaagggcggccggcggcggccgagccgagggtcccgagccaagccggtcgtgagtgacgatgacagtgaggaggaacaagaggaggaccgctcaggaagtggcagcgaagaagactgagccccgacattccagtctcgaccccgagcccctcgttccagagctgagatggcataggccttagcagtaacgggtagcagcagatgtagtttcagacttggagtaaaactgtataaacaaaagaatcttccatatttatacagcagagaagctgtaggactgtttgtgactggccctgtcctggcatcagtagcatctgtaacagcattaactgtcttaaagagagagagagagaattccgaattggggaacacacgatacctgtttttcttttccgttgctggcagtactgttgcgccgcagtttggagtcactgtagttaagtgtggatgcatgtgcgtcaccgtccactcctcctactgtattttattggacaggtcagactcgccgggggcccggcgagggtatgtcagtgtcactggatgtcaaacagtaataaattaaaccaacaacaaaacgcacagccaaaaaaaaa

SEQ ID NO: 202 - protein, 1613 aa, Homo sapiens
MSTPDPPLGGTPRPGPSPGPGPSPGAMLGPSPGPSPGSAHSMMGPSPGPPSAGHPIPTQGPGGYPQDNMHQMHKPMESMHEKGMSDDPRYNQMKGMGMRSGGHAGMGPPPSPMDQHSQGYPSPLGGSEHASSPVPASGPSSGPQMSSGPGGAPLDGADPQALGQQNRGPTPFNQNQLHQLRAQIMAYKMLARGQPLPDHLQMAVQGKRPMPGMQQQMPTLPPPSVSATGPGPGPGPGPGPGPGPAPPNYSRPHGMGGPNMPPPGPSGVPPGMPGQPPGGPPKPWPEGPMANAAAPTSTPQKLIPPQPTGRPSPAPPAVPPAASPVMPPQTQSPGQPAQPAPMVPLHQKQSRITPIQKPRGLDPVEILQEREYRLQARIAHRIQELENLPGSLAGDLRTKATIELKALRLLNFQRQLRQEVVVCMRRDTALETALNAKAYKRSKRQSLREARITEKLEKQQKIEQERKRRQKHQEYLNSILQHAKDFKEYHRSVTGKIQKLTKAVATYHANTEREQKKENERIEKERMRRLMAEDEEGYRKLIDQKKDKRLAYLLQQTDEYVANLTELVRQHKAAQVAKEKKKKKKKKKAENAEGQTPAIGPDGEPLDETSQMSDLPVKVIHVESGKILTGTDAPKAGQLEAWLEMNPGYEVAPRSDSEESGSEEEEEEEEEEQPQAAQPPTLPVEEKKKIPDPDSDDVSEVDARHIIENAKQDVDDEYGVSQALARGLQSYYAVAHAVTERVDKQSALMVNGVLKQYQIKGLEWLVSLYNNNLNGILADEMGLGKTIQTIALITYLMEHKRINGPFLIIVPLSTLSNWAYEFDKWAPSVVKVSYKGSPAARRAFVPQLRSGKFNVLLTTYEYIIKDKHILAKIRWKYMIVDEGHRMKNHHCKLTQVLNTHYVAPRRLLLTGTPLQNKLPELWALLNFLLPTIFKSCSTFEQWFNAPFAMTGEKVDLNEEETILIIRRLHKVLRPFLLRRLKKEVEAQLPEKVEYVIKCDMSALQRVLYRHMQAKGVLLTDGSEKDKKGKGGTKTLMNTIMQLRKICNHPYMFQHIEESFSEHLGFTGGIVQGLDLYRASGKFELLDRILPKLRATNHKVLLFCQMTSLMTIMEDYFAYRGFKYLRLDGTTKAEDRGMLLKTFNEPGSEYFIFLLSTRAGGLGLNLQSADTVIIFDSDWNPHQDLQAQDRAHRIGQQNEVRVLRLCTVNSVEEKILAAAKYKLNVDQKVIQAGMFDQKSSSHERRAFLQAILEHEEQDEEEDEVPDDETVNQMIARHEEEFDLFMRMDLDRRREEARNPKRKPRLMEEDELPSWIIKDDAEVERLTCEEEEEKMFGRGSRHRKEVDYSDSLTEKQWLKAIEEGTLEEIEEEVRQKKSSRKRKRDSDAGSSTPTTSTRSRDKDDESKKQKKRGRPPAEKLSPNPPNLTKKMKKIVDAVIKYKDSSGRQLSEVFIQLPSRKELPEYYELIRKPVDFKKIKERIRNHKYRSLNDLEKDVMLLCQNAQTFNLEGSLIYEDSIVLQSVFTSVRQKIEKEDDSEGEESEEEEEGEEEGSESESRSVKVKIKLGRKEKAQDRLKGGRRRPSRGSRAKPVVSDDDSEEEQEEDRSGSGSEED

SEQ ID NO: 203 - DNA, 5317 bp, Homo sapiens
atgtccactccagacccacccctgggcggaactcctcggccaggtccttccccgggccctggcccttcccctggagccatgctgggccctagcccgggtccctcgccgggctccgcccacagcatgatggggcccagcccagggccgccctcagcaggacaccccatccccacccaggggcctggagggtaccctcaggacaacatgcaccagatgcacaagcccatggagtccatgcatgagaagggcatgtcggacgacccgcgctacaaccagatgaaaggaatggggatgcggtcagggggccatgctgggatggggcccccgcccagccccatggaccagcactcccaaggttacccctcgcccctgggtggctctgagcatgcctctagtccagttccagccagtggcccgtcttcggggccccagatgtcttccgggccaggaggtgccccgctggatggtgctgacccccaggccttggggcagcagaaccggggcccaaccccatttaaccagaaccagctgcaccagctcagagctcagatcatggcctacaagatgctggccagggggcagcccctccccgaccacctgcagatggcggtgcagggcaagcggccgatgcccgggatgcagcagcagatgccaacgctacctccaccctcggtgtccgcaacaggacccggccctggccctggccctggccccggcccgggtcccggcccggcacctccaaattacagcaggcctcatggtatgggagggcccaacatgcctcccccaggaccctcgggcgtgccccccgggatgccaggccagcctcctggagggcctcccaagccctggcctgaaggacccatggcgaatgctgctgcccccacgagcacccctcagaagctgattcccccgcagccaacgggccgcccttcccccgcgccccctgccgtcccacccgccgcctcgcccgtgatgccaccgcagacccagtcccccgggcagccggcccagcccgcgcccatggtgccactgcaccagaagcagagccgcatcacccccatccagaagccgcggggcctcgaccctgtggagatcctgcaggagcgcgagtacaggctgcaggctcgcatcgcacaccgaattcaggaacttgaaaaccttcccgggtccctggccggggatttgcgaaccaaagcgaccattgagctcaaggccctcaggctgctgaacttccagaggcagctgcgccaggaggtggtggtgtgcatgcggagggacacagcgctggagacagccctcaatgctaaggcctacaagcgcagcaagcgccagtccctgcgcgaggcccgcatcactgagaagctggagaagcagcagaagatcgagcaggagcgcaagcgccggcagaagcaccaggaatacctcaatagcattctccagcatgccaaggatttcaaggaatatcacagatccgtcacaggcaaaatccagaagctgaccaaggcagtggccacgtaccatgccaacacggagcgggagcagaagaaagagaacgagcggatcgagaaggagcgcatgcggaggctcatggctgaagatgaggaggggtaccgcaagctcatcgaccagaagaaggacaagcgcctggcctacctcttgcagcagacagacgagtacgtggctaacctcacggagctggtgcggcagcacaaggctgcccaggtcgccaaggagaaaaagaagaaaaagaaaaagaagaaggcagaaaatgcagaaggacagacgcctgccattgggccggatggcgagcctctggacgagaccagccagatgagcgacctcccggtgaaggtgatccacgtggagagtgggaagatcctcacaggcacagatgcccccaaagccgggcagctggaggcctggctcgagatgaacccggggtatgaagtagctccgaggtctgatagtgaagaaagtggctcagaagaagaggaagaggaggaggaggaagagcagccgcaggcagcacagcctcccaccctgcccgtggaggagaagaagaagattccagatccagacagcgatgacgtctctgaggtggacgcgcggcacatcattgagaatgccaagcaagatgtcgatgatgaatatggcgtgtcccaggcccttgcacgtggcctgcagtcctactatgccgtggcccatgctgtcactgagagagtggacaagcagtcagcgcttatggtcaatggtgtcctcaaacagtaccagatcaaaggtttggagtggctggtgtccctgtacaacaacaacctgaacggcatcctggccgacgagatgggcctggggaagaccatccagaccatcgcgctcatcacgtacctcatggagcacaaacgcatcaatgggcccttcctcatcatcgtgcctctctcaacgctgtccaactgggcgtacgagtttgacaagtgggccccctccgtggtgaaggtgtcttacaagggatccccagcagcaagacgggcctttgtcccccagctccggagtgggaagttcaacgtcttgctgacgacgtacgagtacatcatcaaagacaagcacatcctcgccaagatccgttggaagtacatgattgtggacgaaggtcaccgcatgaagaaccaccactgcaagctgacgcaggtgctcaacacgcactatgtggcaccccgccgcctgctgctgacgggcacaccgctgcagaacaagcttcccgagctctgggcgctgctcaacttcctgctgcccaccatcttcaagagctgcagcaccttcgagcagtggtttaacgcaccctttgccatgaccggggaaaaggtggacctgaatgaggaggaaaccattctcatcatccggcgtctccacaaagtgctgcggcccttcttgctccgacgactcaagaaggaagtcgaggcccagttgcccgaaaaggtggagtacgtcatcaagtgcgacatgtctgcgctgcagcgagtgctctaccgccacatgcaggccaagggcgtgctgctgactgatggctccgagaaggacaagaagggcaaaggcggcaccaagaccctgatgaacaccatcatgcagctgcggaagatctgcaaccacccctacatgttccagcacatcgaggagtccttttccgagcacttggggttcactggcggcattgtccaagggctggacctgtaccgagcctcgggtaaatttgagcttcttgatagaattcttcccaaactccgagcaaccaaccacaaagtgctgctgttctgccaaatgacctccctcatgaccatcatggaagattactttgcgtatcgcggctttaaatacctcaggcttgatggaaccacgaaggcggaggaccggggcatgctgctgaaaaccttcaacgagcccggctctgagtacttcatcttcctgctcagcacccgggctggggggctcggcctgaacctccagtcggcagacactgtgatcatttttgacagcgactggaatcctcaccaggacctgcaagcgcaggaccgagcccaccgcatcgggcagcagaacgaggtgcgtgtgctccgcctctgcaccgtcaacagcgtggaggagaagatcctagctgcagccaagtacaagctcaacgtggaccagaaggtgatccaggccggcatgttcgaccagaagtcctccagccatgagcggcgcgccttcctgcaggccatcctggagcacgaggagcaggatgaggaggaagacgaggtgcccgacgacgagaccgtcaaccagatgatcgcccggcacgaggaggagtttgatctgttcatgcgcatggacctggaccgcaggcgcgaggaggcccgcaaccccaagcggaagccgcgcctcatggaggaggacgagctcccctcgtggatcatcaaggacgacgcggaggtggagcggctgacctgtgaggaggaggaggagaagatgttcggccgtggctcccgccaccgcaaggaggtggactacagcgactcactgacggagaagcagtggctcaaggccatcgaggagggcacgctggaggagatcgaagaggaggtccggcagaagaaatcatcacggaagcgcaagcgagacagcgacgccggctcctccaccccgaccaccagcacccgcagccgcgacaaggacgacgagagcaagaagcagaagaagcgcgggcggccgcctgccgagaaactctcccctaacccacccaacctcaccaagaagatgaagaagattgtggatgccgtgatcaagtacaaggacagcagtggacgtcagctcagcgaggtcttcatccagctgccctcgcgaaaggagctgcccgagtactacgagctcatccgcaagcccgtggacttcaagaagataaaggagcgcattcgcaaccacaagtaccgcagcctcaacgacctagagaaggacgtcatgctcctgtgccagaacgcacagaccttcaacctggagggctccctgatctatgaagactccatcgtcttgcagtcggtcttcaccagcgtgcggcagaaaatcgagaaggaggatgacagtgaaggcgaggagagtgaggaggaggaagagggcgaggaggaaggctccgaatccgaatctcggtccgtcaaagtgaagatcaagcttggccggaaggagaaggcacaggaccggctgaagggcggccggcggcggccgagccgagggtcccgagccaagccggtcgtgagtgacgatgacagtgaggaggaacaagaggaggaccgctcaggaagtggcagcgaagaagactgagccccgacattccagtctcgaccccgagcccctcgttccagagctgagatggcataggccttagcagtaacgggtagcagcagatgtagtttcagacttggagtaaaactgtataaacaaaagaatcttccatatttatacagcagagaagctgtaggactgtttgtgactggccctgtcctggcatcagtagcatctgtaacagcattaactgtcttaaagagagagagagagaattccgaattggggaacacacgatacctgtttttcttttccgttgctggcagtactgttgcgccgcagtttggagtcactgtagttaagtgtggatgcatgtgcgtcaccgtccactcctcctactgtattttattggacaggtcagactcgccgggggcccggcgagggtatgtcagtgtcactggatgtcaaacagtaataaattaaaccaacaacaaaacgcacagccaaaaaaaaa

SEQ ID NO: 204 - DNA, 6376 bp, Mus musculus
ggcaagtggagcgggtagacagggaggcgggggcgcgcggcgggcgcgtgcggtgggggggggtggcctggcgaagcccagcgggcgcgcgcgcgaggctttcccactcgcttggcagcggcggagacggcttctttgtttcctgaggagaagcgagacgcccactctgtccccgacccctcgtggagggttgggggcggcgccaggaaggttacggcgccgttacctccaggagaccagtgcctgtagctccagtaaagatgtctactccagacccacccttgggtgggactcctcggcctggtccttccccaggccctggtccttcacctggtgcaatgctgggtcctagccctggcccctcaccaggttctgcccacagcatgatggggccaagcccaggacctccttcagcaggacatcccatgcccacccaggggcctggagggtacccccaggacaacatgcatcagatgcacaagcctatggagtccatgcacgagaagggcatgcctgatgacccacgatacaaccagatgaaagggatgggcatgcggtcaggggcccacacaggcatggcacctccacctagtcccatggaccagcattctcaaggttacccctcacccctcggcggctctgaacatgcctccagtcctgtcccagccagtggcccatcttcaggcccccagatgtcctctgggccaggaggggccccactagatggttctgatccccaggccttgggacagcaaaacagaggcccaaccccatttaaccagaaccagctgcatcaactcagagctcagataatggcctacaagatgttggccaggggccagccattgcccgaccacctgcagatggccgtgcaaggcaagcggccgatgcctggaatgcagcaacagatgccaacactacctccaccctcagtgtccgccacaggacccggacctggacccggccctggccctggccctggcccaggaccagcccctccaaattacagtagaccccatggtatgggagggcccaacatgcctcccccaggaccctcaggtgtgccccccgggatgcctggtcagccgcctggagggcctcccaagccatggcctgaaggacccatggccaatgctgctgcccccacaagcaccccacagaagctgattcctccgcaaccaacaggccgtccttcacctgcacctcctgctgtcccgcctgctgcctcacctgtaatgccaccacaaacacagtccccagggcagccagcccagcctgctccattggtgccactgcaccagaagcagagccgaatcacccccatccagaagccccgaggccttgaccctgtggagatcctacaagagcgggagtacaggcttcaggctcgaatcgcacacagaattcaggaacttgaaaacctccctgggtccctggctggggaccttcgaaccaaagcaaccatcgaactcaaggcccttaggttgctgaacttccagaggcagctgcgccaggaggtggtggtgtgcatgcgaagagacacagccctggagacagccctcaatgccaaggcctacaagcgcagcaaacgtcagtcactacgggaggcccgcatcactgagaagttggagaagcagcagaagattgaacaggagcgcaagcgccgccagaagcaccaggagtacctcaacagcattctgcagcatgccaaggacttcagggagtatcacagatcagtcacaggcaaactccagaaactcaccaaggctgtggccacctaccatgccaacactgagcgggagcagaagaaagaaaatgagcgcattgagaaggagcgaatgcggaggcttatggctgaagatgaggagggctaccgcaaactcattgaccagaagaaggacaagcgcctggcctaccttctgcagcagacagatgagtatgtggccaacctcacagagctggtgcggcagcacaaagctgcccaggttgccaaggagaagaagaagaaaaagaaaaagaagaaggcagaaaatgctgaaggacagacacctgctattggaccagatggtgagcctctggatgagaccagccagatgagtgacctccctgtgaaggtgatccacgtggagagtggcaagatcctcactggcacagatgccccaaaagccgggcagctggaagcctggcttgaaatgaacccagggtatgaagtagcccccaggtcagacagtgaagaaagtggctctgaagaggaggaggaggaggaggaagaggagcagcctcagcccgcacagccccctacactgcctgtggaagaaaagaagaagattccagacccagacagcgatgatgtctctgaggtggacgcccgacacattattgagaacgccaagcaagatgtggacgatgagtacggtgtgtcccaggcccttgctcgtggcctgcagtcttactatgctgtggcccatgcagtcacagagagagtagataagcagtccgccctcatggtcaacggtgtcctcaaacagtaccagatcaagggtttggagtggctggtgtccctgtacaacaacaacctgaatggcatcctggctgatgagatggggctggggaagaccatccagaccatcgcgctcatcacatacctcatggagcacaagcgcatcaacgggcctttcctcatcatcgtgcctctctcgacactgtcaaactgggcgtatgaatttgacaagtgggccccctctgtggtgaaggtttcttacaagggctctccagctgcaaggcgagcttttgtcccacagcttcgcagtgggaagttcaacgtcttactgaccacctatgaatatatcatcaaagacaagcatatcctagccaagatccgctggaagtacatgattgtggatgaaggccaccgcatgaaaaaccaccactgcaagttgacgcaggtccttaacacacactacgtggcccctcggcgcctgcttcttacaggcacaccactgcagaacaagctaccggagctctgggccctgcttaacttcctgctccccactatcttcaagagctgcagcaccttcgaacagtggttcaatgcaccctttgccatgactggagaaaaggtggacctgaatgaagaggagactatcctcattattcgtcgcctacacaaagttctgcggcccttcctgctgcggcggctcaagaaggaagttgaagcccagctccctgagaaggtagagtatgtcatcaaatgcgacatgtcagccctgcagcgtgtgctgtaccgtcacatgcaggccaaaggtgtgctgctgactgacggctccgagaaggacaagaagggcaaaggtggcaccaagacactgatgaacactattatgcaactgcgtaagatctgcaaccacccctacatgttccagcacatcgaggagtccttttctgagcacttggggttcaccggcggcatcgtgcaaggattggacctttaccgtgcctcagggaaatttgaacttcttgatagaattctacccaaactccgtgcaacgaaccataaagtgctcctcttttgccaaatgacctccctcatgaccatcatggaagactactttgcataccgtggcttcaaatacctcaggcttgatggaaccacaaaagcagaagaccggggcatgctgttgaaaacctttaatgaacctggctctgagtatttcattttcctgctcagtacccgtgctggggggctgggcctgaatctgcagtcagctgacactgtgatcatctttgacagtgactggaatccccaccaggacctgcaagcacaggatcgagcccatcgcattggacagcagaatgaggtgcgtgttcttcgcctgtgcacggtcaacagtgtggaagagaagatactggctgctgccaaatacaaactcaatgtggatcagaaggtgatccaggcaggcatgttcgaccagaagtcgtccagccatgagaggcgtgccttcctgcaggccatcctggagcacgaggagcaggatgaggaggaagatgaggtgcctgatgatgagaccgtcaaccagatgattgcccggcacgaagaagagtttgacctcttcatgcgcatggacttggaccgccggcgtgaagaagcccgcaaccccaagcggaagccacgcctgatggaagaggatgagctcccatcctggatcatcaaggatgatgccgaggtggagcggctgacatgtgaagaggaagaggagaagatgttcggccgtggttctcgccaccgcaaggaggtagactacagcgactcactgacagagaagcagtggctcaagaccctgaaggctatcgaggagggcacgctggaggagatcgaagaggaggtccggcagaagaaatcttcacgtaagcgtaagcgagacagcgaggccggctcctccaccccgaccaccagcacccgcagccgtgacaaggatgaggagagcaagaagcagaagaaacgtgggcggccacctgctgagaagctgtccccaaacccacctaacctcaccaagaagatgaagaagatcgtggatgctgtgatcaagtacaaagacagcagcagtggacgtcagctcagcgaggtgttcatccagctcccctctcgcaaggagcttcctgagtactatgagctcatccgaaagcctgtggacttcaagaagatcaaggaacgcatccgaaaccacaagtaccgcagcctcaatgacctggagaaggatgtgatgctgctgtgccagaacgctcagacgttcaacctcgagggttccctgatctatgaggactccatcgtcctgcagtctgtcttcaccagcgtacggcagaagattgagaaggaggacgacagtgaaggcgaggaaagcgaggaggaggaggagggcgaggaggaaggctccgagtctgagtcccgctccgtcaaggtgaagatcaagctgggccgcaaggagaaggcccaggaccgactcaaggggggccgccggcggccaagccggggatcccgggccaagccggttgtgagtgacgatgacagtgaggaggagcaggaggaggaccgctcaggaagtggcagtgaggaagactgaaccagacattcctgagtcctgaccccgaggcgctcgtcccagccaagatggagtagcccttagcagtgatgggtagcaccagatgtagtttcgaacttggagaactgtacacatgcaatcttccacatttttaggcagagaagtataggcctgtctgtcggccctggcctggcctcgagtctctaccagcattaactgtctagagaggggacctcctgggagcaccatccacctccccaggccccagtcactgtagctcagtggatgcatgcgcgtgccggccgctccttgtactgtatcttactggacagggccagctctccaggaggctcacaggcccagcgggtatgtcagtgtcactggagtcagacagtaataaattaaagcaatgacaagccaccactggctccctggactccttgctgtcagcagtggctccggggccacagagaagaaagaaagacttttaggaactgggtctaacttatgggcaaagtacttgccttgccaggtgtatgggttttgcattcccatcacccacacaccctaaacaagccaagtcagtgagcttcaagttagagcctccacctcaatgtgtacgtggaaagcaatcaaagatgatgcctagcatccacctctggccctcatgtgcagatgtacacacactgaattacatacacgggacacacacatccacacggaggcagtccatgacttgcactggggagatggtaccataggcgaaagtgccacaggcacagggccaggctaatttagtcctgcagtcctgtgctcttaagatgaaggcacaaagaggaaccccaggcgctccaactagcatgccaggcagtgacaagaccctgcttcaaatgaatcagagcccacattcagtattgccctcttacccgatgcgatgcccatgccctcacatatgaatgtgtatatatacatacatacgtaaaataattcttttttaaattatagacatttttgtgtgaatgttttgcctgaatgtgtgtgtgtgtgtgtgtgtgtgtgtgtgtgtgtgtgtgtgtgtatcaagtacattcctagagcctacagaggtcaagggagggcattggatctggaactggagtcacatgaggctgtgagcaactgtgtgggttcctgggcctttgcaacagcagttagtactcttcaccactgagccatttctccaatctcaaaaagaagcattcttttaaatgaagactgaaataaataagtaggacttgccttgg

SEQ ID NO: 205 - protein, 1617 aa, Mus musculus
MSTPDPPLGGTPRPGPSPGPGPSPGAMLGPSPGPSPGSAHSMMGPSPGPPSAGHPMPTQGPGGYPQDNMHQMHKPMESMHEKGMPDDPRYNQMKGMGMRSGAHTGMAPPPSPMDQHSQGYPSPLGGSEHASSPVPASGPSSGPQMSSGPGGAPLDGSDPQALGQQNRGPTPFNQNQLHQLRAQIMAYKMLARGQPLPDHLQMAVQGKRPMPGMQQQMPTLPPPSVSATGPGPGPGPGPGPGPGPAPPNYSRPHGMGGPNMPPPGPSGVPPGMPGQPPGGPPKPWPEGPMANAAAPTSTPQKLIPPQPTGRPSPAPPAVPPAASPVMPPQTQSPGQPAQPAPLVPLHQKQSRITPIQKPRGLDPVEILQEREYRLQARIAHRIQELENLPGSLAGDLRTKATIELKALRLLNFQRQLRQEVVVCMRRDTALETALNAKAYKRSKRQSLREARITEKLEKQQKIEQERKRRQKHQEYLNSILQHAKDFREYHRSVTGKLQKLTKAVATYHANTEREQKKENERIEKERMRRLMAEDEEGYRKLIDQKKDKRLAYLLQQTDEYVANLTELVRQHKAAQVAKEKKKKKKKKKAENAEGQTPAIGPDGEPLDETSQMSDLPVKVIHVESGKILTGTDAPKAGQLEAWLEMNPGYEVAPRSDSEESGSEEEEEEEEEEQPQPAQPPTLPVEEKKKIPDPDSDDVSEVDARHIIENAKQDVDDEYGVSQALARGLQSYYAVAHAVTERVDKQSALMVNGVLKQYQIKGLEWLVSLYNNNLNGILADEMGLGKTIQTIALITYLMEHKRINGPFLIIVPLSTLSNWAYEFDKWAPSVVKVSYKGSPAARRAFVPQLRSGKFNVLLTTYEYIIKDKHILAKIRWKYMIVDEGHRMKNHHCKLTQVLNTHYVAPRRLLLTGTPLQNKLPELWALLNFLLPTIFKSCSTFEQWFNAPFAMTGEKVDLNEEETILIIRRLHKVLRPFLLRRLKKEVEAQLPEKVEYVIKCDMSALQRVLYRHMQAKGVLLTDGSEKDKKGKGGTKTLMNTIMQLRKICNHPYMFQHIEESFSEHLGFTGGIVQGLDLYRASGKFELLDRILPKLRATNHKVLLFCQMTSLMTIMEDYFAYRGFKYLRLDGTTKAEDRGMLLKTFNEPGSEYFIFLLSTRAGGLGLNLQSADTVIIFDSDWNPHQDLQAQDRAHRIGQQNEVRVLRLCTVNSVEEKILAAAKYKLNVDQKVIQAGMFDQKSSSHERRAFLQAILEHEEQDEEEDEVPDDETVNQMIARHEEEFDLFMRMDLDRRREEARNPKRKPRLMEEDELPSWIIKDDAEVERLTCEEEEEKMFGRGSRHRKEVDYSDSLTEKQWLKTLKAIEEGTLEEIEEEVRQKKSSRKRKRDSEAGSSTPTTSTRSRDKDEESKKQKKRGRPPAEKLSPNPPNLTKKMKKIVDAVIKYKDSSSGRQLSEVFIQLPSRKELPEYYELIRKPVDFKKIKERIRNHKYRSLNDLEKDVMLLCQNAQTFNLEGSLIYEDSIVLQSVFTSVRQKIEKEDDSEGEESEEEEEGEEEGSESESRSVKVKIKLGRKEKAQDRLKGGRRRPSRGSRAKPVVSDDDSEEEQEEDRSGSGSEED

SEQ ID NO: 206 - DNA, 6367 bp, Mus musculus
ggcaagtggagcgggtagacagggaggcgggggcgcgcggcgggcgcgtgcggtgggggggggtggcctggcgaagcccagcgggcgcgcgcgcgaggctttcccactcgcttggcagcggcggagacggcttctttgtttcctgaggagaagcgagacgcccactctgtccccgacccctcgtggagggttgggggcggcgccaggaaggttacggcgccgttacctccaggagaccagtgcctgtagctccagtaaagatgtctactccagacccacccttgggtgggactcctcggcctggtccttccccaggccctggtccttcacctggtgcaatgctgggtcctagccctggcccctcaccaggttctgcccacagcatgatggggccaagcccaggacctccttcagcaggacatcccatgcccacccaggggcctggagggtacccccaggacaacatgcatcagatgcacaagcctatggagtccatgcacgagaagggcatgcctgatgacccacgatacaaccagatgaaagggatgggcatgcggtcaggggcccacacaggcatggcacctccacctagtcccatggaccagcattctcaaggttacccctcacccctcggcggctctgaacatgcctccagtcctgtcccagccagtggcccatcttcaggcccccagatgtcctctgggccaggaggggccccactagatggttctgatccccaggccttgggacagcaaaacagaggcccaaccccatttaaccagaaccagctgcatcaactcagagctcagataatggcctacaagatgttggccaggggccagccattgcccgaccacctgcagatggccgtgcaaggcaagcggccgatgcctggaatgcagcaacagatgccaacactacctccaccctcagtgtccgccacaggacccggacctggacccggccctggccctggccctggcccaggaccagcccctccaaattacagtagaccccatggtatgggagggcccaacatgcctcccccaggaccctcaggtgtgccccccgggatgcctggtcagccgcctggagggcctcccaagccatggcctgaaggacccatggccaatgctgctgcccccacaagcaccccacagaagctgattcctccgcaaccaacaggccgtccttcacctgcacctcctgctgtcccgcctgctgcctcacctgtaatgccaccacaaacacagtccccagggcagccagcccagcctgctccattggtgccactgcaccagaagcagagccgaatcacccccatccagaagccccgaggccttgaccctgtggagatcctacaagagcgggagtacaggcttcaggctcgaatcgcacacagaattcaggaacttgaaaacctccctgggtccctggctggggaccttcgaaccaaagcaaccatcgaactcaaggcccttaggttgctgaacttccagaggcagctgcgccaggaggtggtggtgtgcatgcgaagagacacagccctggagacagccctcaatgccaaggcctacaagcgcagcaaacgtcagtcactacgggaggcccgcatcactgagaagttggagaagcagcagaagattgaacaggagcgcaagcgccgccagaagcaccaggagtacctcaacagcattctgcagcatgccaaggacttcagggagtatcacagatcagtcacaggcaaactccagaaactcaccaaggctgtggccacctaccatgccaacactgagcgggagcagaagaaagaaaatgagcgcattgagaaggagcgaatgcggaggcttatggctgaagatgaggagggctaccgcaaactcattgaccagaagaaggacaagcgcctggcctaccttctgcagcagacagatgagtatgtggccaacctcacagagctggtgcggcagcacaaagctgcccaggttgccaaggagaagaagaagaaaaagaaaaagaagaaggcagaaaatgctgaaggacagacacctgctattggaccagatggtgagcctctggatgagaccagccagatgagtgacctccctgtgaaggtgatccacgtggagagtggcaagatcctcactggcacagatgccccaaaagccgggcagctggaagcctggcttgaaatgaacccagggtatgaagtagcccccaggtcagacagtgaagaaagtggctctgaagaggaggaggaggaggaggaagaggagcagcctcagcccgcacagccccctacactgcctgtggaagaaaagaagaagattccagacccagacagcgatgatgtctctgaggtggacgcccgacacattattgagaacgccaagcaagatgtggacgatgagtacggtgtgtcccaggcccttgctcgtggcctgcagtcttactatgctgtggcccatgcagtcacagagagagtagataagcagtccgccctcatggtcaacggtgtcctcaaacagtaccagatcaagggtttggagtggctggtgtccctgtacaacaacaacctgaatggcatcctggctgatgagatggggctggggaagaccatccagaccatcgcgctcatcacatacctcatggagcacaagcgcatcaacgggcctttcctcatcatcgtgcctctctcgacactgtcaaactgggcgtatgaatttgacaagtgggccccctctgtggtgaaggtttcttacaagggctctccagctgcaaggcgagcttttgtcccacagcttcgcagtgggaagttcaacgtcttactgaccacctatgaatatatcatcaaagacaagcatatcctagccaagatccgctggaagtacatgattgtggatgaaggccaccgcatgaaaaaccaccactgcaagttgacgcaggtccttaacacacactacgtggcccctcggcgcctgcttcttacaggcacaccactgcagaacaagctaccggagctctgggccctgcttaacttcctgctccccactatcttcaagagctgcagcaccttcgaacagtggttcaatgcaccctttgccatgactggagaaaaggtggacctgaatgaagaggagactatcctcattattcgtcgcctacacaaagttctgcggcccttcctgctgcggcggctcaagaaggaagttgaagcccagctccctgagaaggtagagtatgtcatcaaatgcgacatgtcagccctgcagcgtgtgctgtaccgtcacatgcaggccaaaggtgtgctgctgactgacggctccgagaaggacaagaagggcaaaggtggcaccaagacactgatgaacactattatgcaactgcgtaagatctgcaaccacccctacatgttccagcacatcgaggagtccttttctgagcacttggggttcaccggcggcatcgtgcaaggattggacctttaccgtgcctcagggaaatttgaacttcttgatagaattctacccaaactccgtgcaacgaaccataaagtgctcctcttttgccaaatgacctccctcatgaccatcatggaagactactttgcataccgtggcttcaaatacctcaggcttgatggaaccacaaaagcagaagaccggggcatgctgttgaaaacctttaatgaacctggctctgagtatttcattttcctgctcagtacccgtgctggggggctgggcctgaatctgcagtcagctgacactgtgatcatctttgacagtgactggaatccccaccaggacctgcaagcacaggatcgagcccatcgcattggacagcagaatgaggtgcgtgttcttcgcctgtgcacggtcaacagtgtggaagagaagatactggctgctgccaaatacaaactcaatgtggatcagaaggtgatccaggcaggcatgttcgaccagaagtcgtccagccatgagaggcgtgccttcctgcaggccatcctggagcacgaggagcaggatgaggaggaagatgaggtgcctgatgatgagaccgtcaaccagatgattgcccggcacgaagaagagtttgacctcttcatgcgcatggacttggaccgccggcgtgaagaagcccgcaaccccaagcggaagccacgcctgatggaagaggatgagctcccatcctggatcatcaaggatgatgccgaggtggagcggctgacatgtgaagaggaagaggagaagatgttcggccgtggttctcgccaccgcaaggaggtagactacagcgactcactgacagagaagcagtggctcaaggctatcgaggagggcacgctggaggagatcgaagaggaggtccggcagaagaaatcttcacgtaagcgtaagcgagacagcgaggccggctcctccaccccgaccaccagcacccgcagccgtgacaaggatgaggagagcaagaagcagaagaaacgtgggcggccacctgctgagaagctgtccccaaacccacctaacctcaccaagaagatgaagaagatcgtggatgctgtgatcaagtacaaagacagcagcagtggacgtcagctcagcgaggtgttcatccagctcccctctcgcaaggagcttcctgagtactatgagctcatccgaaagcctgtggacttcaagaagatcaaggaacgcatccgaaaccacaagtaccgcagcctcaatgacctggagaaggatgtgatgctgctgtgccagaacgctcagacgttcaacctcgagggttccctgatctatgaggactccatcgtcctgcagtctgtcttcaccagcgtacggcagaagattgagaaggaggacgacagtgaaggcgaggaaagcgaggaggaggaggagggcgaggaggaaggctccgagtctgagtcccgctccgtcaaggtgaagatcaagctgggccgcaaggagaaggcccaggaccgactcaaggggggccgccggcggccaagccggggatcccgggccaagccggttgtgagtgacgatgacagtgaggaggagcaggaggaggaccgctcaggaagtggcagtgaggaagactgaaccagacattcctgagtcctgaccccgaggcgctcgtcccagccaagatggagtagcccttagcagtgatgggtagcaccagatgtagtttcgaacttggagaactgtacacatgcaatcttccacatttttaggcagagaagtataggcctgtctgtcggccctggcctggcctcgagtctctaccagcattaactgtctagagaggggacctcctgggagcaccatccacctccccaggccccagtcactgtagctcagtggatgcatgcgcgtgccggccgctccttgtactgtatcttactggacagggccagctctccaggaggctcacaggcccagcgggtatgtcagtgtcactggagtcagacagtaataaattaaagcaatgacaagccaccactggctccctggactccttgctgtcagcagtggctccggggccacagagaagaaagaaagacttttaggaactgggtctaacttatgggcaaagtacttgccttgccaggtgtatgggttttgcattcccatcacccacacaccctaaacaagccaagtcagtgagcttcaagttagagcctccacctcaatgtgtacgtggaaagcaatcaaagatgatgcctagcatccacctctggccctcatgtgcagatgtacacacactgaattacatacacgggacacacacatccacacggaggcagtccatgacttgcactggggagatggtaccataggcgaaagtgccacaggcacagggccaggctaatttagtcctgcagtcctgtgctcttaagatgaaggcacaaagaggaaccccaggcgctccaactagcatgccaggcagtgacaagaccctgcttcaaatgaatcagagcccacattcagtattgccctcttacccgatgcgatgcccatgccctcacatatgaatgtgtatatatacatacatacgtaaaataattcttttttaaattatagacatttttgtgtgaatgttttgcctgaatgtgtgtgtgtgtgtgtgtgtgtgtgtgtgtgtgtgtgtgtgtgtatcaagtacattcctagagcctacagaggtcaagggagggcattggatctggaactggagtcacatgaggctgtgagcaactgtgtgggttcctgggcctttgcaacagcagttagtactcttcaccactgagccatttctccaatctcaaaaagaagcattcttttaaatgaagactgaaataaataagtaggacttgccttgg

SEQ ID NO: 207 - protein, 1614 aa, Mus musculus
MSTPDPPLGGTPRPGPSPGPGPSPGAMLGPSPGPSPGSAHSMMGPSPGPPSAGHPMPTQGPGGYPQDNMHQMHKPMESMHEKGMPDDPRYNQMKGMGMRSGAHTGMAPPPSPMDQHSQGYPSPLGGSEHASSPVPASGPSSGPQMSSGPGGAPLDGSDPQALGQQNRGPTPFNQNQLHQLRAQIMAYKMLARGQPLPDHLQMAVQGKRPMPGMQQQMPTLPPPSVSATGPGPGPGPGPGPGPGPAPPNYSRPHGMGGPNMPPPGPSGVPPGMPGQPPGGPPKPWPEGPMANAAAPTSTPQKLIPPQPTGRPSPAPPAVPPAASPVMPPQTQSPGQPAQPAPLVPLHQKQSRITPIQKPRGLDPVEILQEREYRLQARIAHRIQELENLPGSLAGDLRTKATIELKALRLLNFQRQLRQEVVVCMRRDTALETALNAKAYKRSKRQSLREARITEKLEKQQKIEQERKRRQKHQEYLNSILQHAKDFREYHRSVTGKLQKLTKAVATYHANTEREQKKENERIEKERMRRLMAEDEEGYRKLIDQKKDKRLAYLLQQTDEYVANLTELVRQHKAAQVAKEKKKKKKKKKAENAEGQTPAIGPDGEPLDETSQMSDLPVKVIHVESGKILTGTDAPKAGQLEAWLEMNPGYEVAPRSDSEESGSEEEEEEEEEEQPQPAQPPTLPVEEKKKIPDPDSDDVSEVDARHIIENAKQDVDDEYGVSQALARGLQSYYAVAHAVTERVDKQSALMVNGVLKQYQIKGLEWLVSLYNNNLNGILADEMGLGKTIQTIALITYLMEHKRINGPFLIIVPLSTLSNWAYEFDKWAPSVVKVSYKGSPAARRAFVPQLRSGKFNVLLTTYEYIIKDKHILAKIRWKYMIVDEGHRMKNHHCKLTQVLNTHYVAPRRLLLTGTPLQNKLPELWALLNFLLPTIFKSCSTFEQWFNAPFAMTGEKVDLNEEETILIIRRLHKVLRPFLLRRLKKEVEAQLPEKVEYVIKCDMSALQRVLYRHMQAKGVLLTDGSEKDKKGKGGTKTLMNTIMQLRKICNHPYMFQHIEESFSEHLGFTGGIVQGLDLYRASGKFELLDRILPKLRATNHKVLLFCQMTSLMTIMEDYFAYRGFKYLRLDGTTKAEDRGMLLKTFNEPGSEYFIFLLSTRAGGLGLNLQSADTVIIFDSDWNPHQDLQAQDRAHRIGQQNEVRVLRLCTVNSVEEKILAAAKYKLNVDQKVIQAGMFDQKSSSHERRAFLQAILEHEEQDEEEDEVPDDETVNQMIARHEEEFDLFMRMDLDRRREEARNPKRKPRLMEEDELPSWIIKDDAEVERLTCEEEEEKMFGRGSRHRKEVDYSDSLTEKQWLKAIEEGTLEEIEEEVRQKKSSRKRKRDSEAGSSTPTTSTRSRDKDEESKKQKKRGRPPAEKLSPNPPNLTKKMKKIVDAVIKYKDSSSGRQLSEVFIQLPSRKELPEYYELIRKPVDFKKIKERIRNHKYRSLNDLEKDVMLLCQNAQTFNLEGSLIYEDSIVLQSVFTSVRQKIEKEDDSEGEESEEEEEGEEEGSESESRSVKVKIKLGRKEKAQDRLKGGRRRPSRGSRAKPVVSDDDSEEEQEEDRSGSGSEED

SEQ ID NO: 208 - DNA, 6364 bp, Mus musculus
ggcaagtggagcgggtagacagggaggcgggggcgcgcggcgggcgcgtgcggtgggggggggtggcctggcgaagcccagcgggcgcgcgcgcgaggctttcccactcgcttggcagcggcggagacggcttctttgtttcctgaggagaagcgagacgcccactctgtccccgacccctcgtggagggttgggggcggcgccaggaaggttacggcgccgttacctccaggagaccagtgcctgtagctccagtaaagatgtctactccagacccacccttgggtgggactcctcggcctggtccttccccaggccctggtccttcacctggtgcaatgctgggtcctagccctggcccctcaccaggttctgcccacagcatgatggggccaagcccaggacctccttcagcaggacatcccatgcccacccaggggcctggagggtacccccaggacaacatgcatcagatgcacaagcctatggagtccatgcacgagaagggcatgcctgatgacccacgatacaaccagatgaaagggatgggcatgcggtcaggggcccacacaggcatggcacctccacctagtcccatggaccagcattctcaaggttacccctcacccctcggcggctctgaacatgcctccagtcctgtcccagccagtggcccatcttcaggcccccagatgtcctctgggccaggaggggccccactagatggttctgatccccaggccttgggacagcaaaacagaggcccaaccccatttaaccagaaccagctgcatcaactcagagctcagataatggcctacaagatgttggccaggggccagccattgcccgaccacctgcagatggccgtgcaaggcaagcggccgatgcctggaatgcagcaacagatgccaacactacctccaccctcagtgtccgccacaggacccggacctggacccggccctggccctggccctggcccaggaccagcccctccaaattacagtagaccccatggtatgggagggcccaacatgcctcccccaggaccctcaggtgtgccccccgggatgcctggtcagccgcctggagggcctcccaagccatggcctgaaggacccatggccaatgctgctgcccccacaagcaccccacagaagctgattcctccgcaaccaacaggccgtccttcacctgcacctcctgctgtcccgcctgctgcctcacctgtaatgccaccacaaacacagtccccagggcagccagcccagcctgctccattggtgccactgcaccagaagcagagccgaatcacccccatccagaagccccgaggccttgaccctgtggagatcctacaagagcgggagtacaggcttcaggctcgaatcgcacacagaattcaggaacttgaaaacctccctgggtccctggctggggaccttcgaaccaaagcaaccatcgaactcaaggcccttaggttgctgaacttccagaggcagctgcgccaggaggtggtggtgtgcatgcgaagagacacagccctggagacagccctcaatgccaaggcctacaagcgcagcaaacgtcagtcactacgggaggcccgcatcactgagaagttggagaagcagcagaagattgaacaggagcgcaagcgccgccagaagcaccaggagtacctcaacagcattctgcagcatgccaaggacttcagggagtatcacagatcagtcacaggcaaactccagaaactcaccaaggctgtggccacctaccatgccaacactgagcgggagcagaagaaagaaaatgagcgcattgagaaggagcgaatgcggaggcttatggctgaagatgaggagggctaccgcaaactcattgaccagaagaaggacaagcgcctggcctaccttctgcagcagacagatgagtatgtggccaacctcacagagctggtgcggcagcacaaagctgcccaggttgccaaggagaagaagaagaaaaagaaaaagaagaaggcagaaaatgctgaaggacagacacctgctattggaccagatggtgagcctctggatgagaccagccagatgagtgacctccctgtgaaggtgatccacgtggagagtggcaagatcctcactggcacagatgccccaaaagccgggcagctggaagcctggcttgaaatgaacccagggtatgaagtagcccccaggtcagacagtgaagaaagtggctctgaagaggaggaggaggaggaggaagaggagcagcctcagcccgcacagccccctacactgcctgtggaagaaaagaagaagattccagacccagacagcgatgatgtctctgaggtggacgcccgacacattattgagaacgccaagcaagatgtggacgatgagtacggtgtgtcccaggcccttgctcgtggcctgcagtcttactatgctgtggcccatgcagtcacagagagagtagataagcagtccgccctcatggtcaacggtgtcctcaaacagtaccagatcaagggtttggagtggctggtgtccctgtacaacaacaacctgaatggcatcctggctgatgagatggggctggggaagaccatccagaccatcgcgctcatcacatacctcatggagcacaagcgcatcaacgggcctttcctcatcatcgtgcctctctcgacactgtcaaactgggcgtatgaatttgacaagtgggccccctctgtggtgaaggtttcttacaagggctctccagctgcaaggcgagcttttgtcccacagcttcgcagtgggaagttcaacgtcttactgaccacctatgaatatatcatcaaagacaagcatatcctagccaagatccgctggaagtacatgattgtggatgaaggccaccgcatgaaaaaccaccactgcaagttgacgcaggtccttaacacacactacgtggcccctcggcgcctgcttcttacaggcacaccactgcagaacaagctaccggagctctgggccctgcttaacttcctgctccccactatcttcaagagctgcagcaccttcgaacagtggttcaatgcaccctttgccatgactggagaaaaggtggacctgaatgaagaggagactatcctcattattcgtcgcctacacaaagttctgcggcccttcctgctgcggcggctcaagaaggaagttgaagcccagctccctgagaaggtagagtatgtcatcaaatgcgacatgtcagccctgcagcgtgtgctgtaccgtcacatgcaggccaaaggtgtgctgctgactgacggctccgagaaggacaagaagggcaaaggtggcaccaagacactgatgaacactattatgcaactgcgtaagatctgcaaccacccctacatgttccagcacatcgaggagtccttttctgagcacttggggttcaccggcggcatcgtgcaaggattggacctttaccgtgcctcagggaaatttgaacttcttgatagaattctacccaaactccgtgcaacgaaccataaagtgctcctcttttgccaaatgacctccctcatgaccatcatggaagactactttgcataccgtggcttcaaatacctcaggcttgatggaaccacaaaagcagaagaccggggcatgctgttgaaaacctttaatgaacctggctctgagtatttcattttcctgctcagtacccgtgctggggggctgggcctgaatctgcagtcagctgacactgtgatcatctttgacagtgactggaatccccaccaggacctgcaagcacaggatcgagcccatcgcattggacagcagaatgaggtgcgtgttcttcgcctgtgcacggtcaacagtgtggaagagaagatactggctgctgccaaatacaaactcaatgtggatcagaaggtgatccaggcaggcatgttcgaccagaagtcgtccagccatgagaggcgtgccttcctgcaggccatcctggagcacgaggagcaggatgaggaggaagatgaggtgcctgatgatgagaccgtcaaccagatgattgcccggcacgaagaagagtttgacctcttcatgcgcatggacttggaccgccggcgtgaagaagcccgcaaccccaagcggaagccacgcctgatggaagaggatgagctcccatcctggatcatcaaggatgatgccgaggtggagcggctgacatgtgaagaggaagaggagaagatgttcggccgtggttctcgccaccgcaaggaggtagactacagcgactcactgacagagaagcagtggctcaaggctatcgaggagggcacgctggaggagatcgaagaggaggtccggcagaagaaatcttcacgtaagcgtaagcgagacagcgaggccggctcctccaccccgaccaccagcacccgcagccgtgacaaggatgaggagagcaagaagcagaagaaacgtgggcggccacctgctgagaagctgtccccaaacccacctaacctcaccaagaagatgaagaagatcgtggatgctgtgatcaagtacaaagacagcagtggacgtcagctcagcgaggtgttcatccagctcccctctcgcaaggagcttcctgagtactatgagctcatccgaaagcctgtggacttcaagaagatcaaggaacgcatccgaaaccacaagtaccgcagcctcaatgacctggagaaggatgtgatgctgctgtgccagaacgctcagacgttcaacctcgagggttccctgatctatgaggactccatcgtcctgcagtctgtcttcaccagcgtacggcagaagattgagaaggaggacgacagtgaaggcgaggaaagcgaggaggaggaggagggcgaggaggaaggctccgagtctgagtcccgctccgtcaaggtgaagatcaagctgggccgcaaggagaaggcccaggaccgactcaaggggggccgccggcggccaagccggggatcccgggccaagccggttgtgagtgacgatgacagtgaggaggagcaggaggaggaccgctcaggaagtggcagtgaggaagactgaaccagacattcctgagtcctgaccccgaggcgctcgtcccagccaagatggagtagcccttagcagtgatgggtagcaccagatgtagtttcgaacttggagaactgtacacatgcaatcttccacatttttaggcagagaagtataggcctgtctgtcggccctggcctggcctcgagtctctaccagcattaactgtctagagaggggacctcctgggagcaccatccacctccccaggccccagtcactgtagctcagtggatgcatgcgcgtgccggccgctccttgtactgtatcttactggacagggccagctctccaggaggctcacaggcccagcgggtatgtcagtgtcactggagtcagacagtaataaattaaagcaatgacaagccaccactggctccctggactccttgctgtcagcagtggctccggggccacagagaagaaagaaagacttttaggaactgggtctaacttatgggcaaagtacttgccttgccaggtgtatgggttttgcattcccatcacccacacaccctaaacaagccaagtcagtgagcttcaagttagagcctccacctcaatgtgtacgtggaaagcaatcaaagatgatgcctagcatccacctctggccctcatgtgcagatgtacacacactgaattacatacacgggacacacacatccacacggaggcagtccatgacttgcactggggagatggtaccataggcgaaagtgccacaggcacagggccaggctaatttagtcctgcagtcctgtgctcttaagatgaaggcacaaagaggaaccccaggcgctccaactagcatgccaggcagtgacaagaccctgcttcaaatgaatcagagcccacattcagtattgccctcttacccgatgcgatgcccatgccctcacatatgaatgtgtatatatacatacatacgtaaaataattcttttttaaattatagacatttttgtgtgaatgttttgcctgaatgtgtgtgtgtgtgtgtgtgtgtgtgtgtgtgtgtgtgtgtgtgtatcaagtacattcctagagcctacagaggtcaagggagggcattggatctggaactggagtcacatgaggctgtgagcaactgtgtgggttcctgggcctttgcaacagcagttagtactcttcaccactgagccatttctccaatctcaaaaagaagcattcttttaaatgaagactgaaataaataagtaggacttgccttgg

SEQ ID NO: 209 - protein, 1613 aa, Mus musculus
MSTPDPPLGGTPRPGPSPGPGPSPGAMLGPSPGPSPGSAHSMMGPSPGPPSAGHPMPTQGPGGYPQDNMHQMHKPMESMHEKGMPDDPRYNQMKGMGMRSGAHTGMAPPPSPMDQHSQGYPSPLGGSEHASSPVPASGPSSGPQMSSGPGGAPLDGSDPQALGQQNRGPTPFNQNQLHQLRAQIMAYKMLARGQPLPDHLQMAVQGKRPMPGMQQQMPTLPPPSVSATGPGPGPGPGPGPGPGPAPPNYSRPHGMGGPNMPPPGPSGVPPGMPGQPPGGPPKPWPEGPMANAAAPTSTPQKLIPPQPTGRPSPAPPAVPPAASPVMPPQTQSPGQPAQPAPLVPLHQKQSRITPIQKPRGLDPVEILQEREYRLQARIAHRIQELENLPGSLAGDLRTKATIELKALRLLNFQRQLRQEVVVCMRRDTALETALNAKAYKRSKRQSLREARITEKLEKQQKIEQERKRRQKHQEYLNSILQHAKDFREYHRSVTGKLQKLTKAVATYHANTEREQKKENERIEKERMRRLMAEDEEGYRKLIDQKKDKRLAYLLQQTDEYVANLTELVRQHKAAQVAKEKKKKKKKKKAENAEGQTPAIGPDGEPLDETSQMSDLPVKVIHVESGKILTGTDAPKAGQLEAWLEMNPGYEVAPRSDSEESGSEEEEEEEEEEQPQPAQPPTLPVEEKKKIPDPDSDDVSEVDARHIIENAKQDVDDEYGVSQALARGLQSYYAVAHAVTERVDKQSALMVNGVLKQYQIKGLEWLVSLYNNNLNGILADEMGLGKTIQTIALITYLMEHKRINGPFLIIVPLSTLSNWAYEFDKWAPSVVKVSYKGSPAARRAFVPQLRSGKFNVLLTTYEYIIKDKHILAKIRWKYMIVDEGHRMKNHHCKLTQVLNTHYVAPRRLLLTGTPLQNKLPELWALLNFLLPTIFKSCSTFEQWFNAPFAMTGEKVDLNEEETILIIRRLHKVLRPFLLRRLKKEVEAQLPEKVEYVIKCDMSALQRVLYRHMQAKGVLLTDGSEKDKKGKGGTKTLMNTIMQLRKICNHPYMFQHIEESFSEHLGFTGGIVQGLDLYRASGKFELLDRILPKLRATNHKVLLFCQMTSLMTIMEDYFAYRGFKYLRLDGTTKAEDRGMLLKTFNEPGSEYFIFLLSTRAGGLGLNLQSADTVIIFDSDWNPHQDLQAQDRAHRIGQQNEVRVLRLCTVNSVEEKILAAAKYKLNVDQKVIQAGMFDQKSSSHERRAFLQAILEHEEQDEEEDEVPDDETVNQMIARHEEEFDLFMRMDLDRRREEARNPKRKPRLMEEDELPSWIIKDDAEVERLTCEEEEEKMFGRGSRHRKEVDYSDSLTEKQWLKAIEEGTLEEIEEEVRQKKSSRKRKRDSEAGSSTPTTSTRSRDKDEESKKQKKRGRPPAEKLSPNPPNLTKKMKKIVDAVIKYKDSSGRQLSEVFIQLPSRKELPEYYELIRKPVDFKKIKERIRNHKYRSLNDLEKDVMLLCQNAQTFNLEGSLIYEDSIVLQSVFTSVRQKIEKEDDSEGEESEEEEEGEEEGSESESRSVKVKIKLGRKEKAQDRLKGGRRRPSRGSRAKPVVSDDDSEEEQEEDRSGSGSEED

SEQ ID NO: 210 - DNA, 6466 bp, Mus musculus
ggcaagtggagcgggtagacagggaggcgggggcgcgcggcgggcgcgtgcggtgggggggggtggcctggcgaagcccagcgggcgcgcgcgcgaggctttcccactcgcttggcagcggcggagacggcttctttgtttcctgaggagaagcgagacgcccactctgtccccgacccctcgtggagggttgggggcggcgccaggaaggttacggcgccgttacctccaggagaccagtgcctgtagctccagtaaagatgtctactccagacccacccttgggtgggactcctcggcctggtccttccccaggccctggtccttcacctggtgcaatgctgggtcctagccctggcccctcaccaggttctgcccacagcatgatggggccaagcccaggacctccttcagcaggacatcccatgcccacccaggggcctggagggtacccccaggacaacatgcatcagatgcacaagcctatggagtccatgcacgagaagggcatgcctgatgacccacgatacaaccagatgaaagggatgggcatgcggtcaggggcccacacaggcatggcacctccacctagtcccatggaccagcattctcaaggttacccctcacccctcggcggctctgaacatgcctccagtcctgtcccagccagtggcccatcttcaggcccccagatgtcctctgggccaggaggggccccactagatggttctgatccccaggccttgggacagcaaaacagaggcccaaccccatttaaccagaaccagctgcatcaactcagagctcagataatggcctacaagatgttggccaggggccagccattgcccgaccacctgcagatggccgtgcaaggcaagcggccgatgcctggaatgcagcaacagatgccaacactacctccaccctcagtgtccgccacaggacccggacctggacccggccctggccctggccctggcccaggaccagcccctccaaattacagtagaccccatggtatgggagggcccaacatgcctcccccaggaccctcaggtgtgccccccgggatgcctggtcagccgcctggagggcctcccaagccatggcctgaaggacccatggccaatgctgctgcccccacaagcaccccacagaagctgattcctccgcaaccaacaggccgtccttcacctgcacctcctgctgtcccgcctgctgcctcacctgtaatgccaccacaaacacagtccccagggcagccagcccagcctgctccattggtgccactgcaccagaagcagagccgaatcacccccatccagaagccccgaggccttgaccctgtggagatcctacaagagcgggagtacaggcttcaggctcgaatcgcacacagaattcaggaacttgaaaacctccctgggtccctggctggggaccttcgaaccaaagcaaccatcgaactcaaggcccttaggttgctgaacttccagaggcagctgcgccaggaggtggtggtgtgcatgcgaagagacacagccctggagacagccctcaatgccaaggcctacaagcgcagcaaacgtcagtcactacgggaggcccgcatcactgagaagttggagaagcagcagaagattgaacaggagcgcaagcgccgccagaagcaccaggagtacctcaacagcattctgcagcatgccaaggacttcagggagtatcacagatcagtcacaggcaaactccagaaactcaccaaggctgtggccacctaccatgccaacactgagcgggagcagaagaaagaaaatgagcgcattgagaaggagcgaatgcggaggcttatggctgaagatgaggagggctaccgcaaactcattgaccagaagaaggacaagcgcctggcctaccttctgcagcagacagatgagtatgtggccaacctcacagagctggtgcggcagcacaaagctgcccaggttgccaaggagaagaagaagaaaaagaaaaagaagaaggcagaaaatgctgaaggacagacacctgctattggaccagatggtgagcctctggatgagaccagccagatgagtgacctccctgtgaaggtgatccacgtggagagtggcaagatcctcactggcacagatgccccaaaagccgggcagctggaagcctggcttgaaatgaacccagggtatgaagtagcccccaggtcagacagtgaagaaagtggctctgaagaggaggaggaggaggaggaagaggagcagcctcagcccgcacagccccctacactgcctgtggaagaaaagaagaagattccagacccagacagcgatgatgtctctgaggtggacgcccgacacattattgagaacgccaagcaagatgtggacgatgagtacggtgtgtcccaggcccttgctcgtggcctgcagtcttactatgctgtggcccatgcagtcacagagagagtagataagcagtccgccctcatggtcaacggtgtcctcaaacagtaccagatcaagggtttggagtggctggtgtccctgtacaacaacaacctgaatggcatcctggctgatgagatggggctggggaagaccatccagaccatcgcgctcatcacatacctcatggagcacaagcgcatcaacgggcctttcctcatcatcgtgcctctctcgacactgtcaaactgggcgtatgaatttgacaagtgggccccctctgtggtgaaggtttcttacaagggctctccagctgcaaggcgagcttttgtcccacagcttcgcagtgggaagttcaacgtcttactgaccacctatgaatatatcatcaaagacaagcatatcctagccaagatccgctggaagtacatgattgtggatgaaggccaccgcatgaaaaaccaccactgcaagttgacgcaggtccttaacacacactacgtggcccctcggcgcctgcttcttacaggcacaccactgcagaacaagctaccggagctctgggccctgcttaacttcctgctccccactatcttcaagagctgcagcaccttcgaacagtggttcaatgcaccctttgccatgactggagaaaaggtggacctgaatgaagaggagactatcctcattattcgtcgcctacacaaagttctgcggcccttcctgctgcggcggctcaagaaggaagttgaagcccagctccctgagaaggtagagtatgtcatcaaatgcgacatgtcagccctgcagcgtgtgctgtaccgtcacatgcaggccaaaggtgtgctgctgactgacggctccgagaaggacaagaagggcaaaggtggcaccaagacactgatgaacactattatgcaactgcgtaagatctgcaaccacccctacatgttccagcacatcgaggagtccttttctgagcacttggggttcaccggcggcatcgtgcaaggattggacctttaccgtgcctcagggaaatttgaacttcttgatagaattctacccaaactccgtgcaacgaaccataaagtgctcctcttttgccaaatgacctccctcatgaccatcatggaagactactttgcataccgtggcttcaaatacctcaggcttgatggaaccacaaaagcagaagaccggggcatgctgttgaaaacctttaatgaacctggctctgagtatttcattttcctgctcagtacccgtgctggggggctgggcctgaatctgcagtcagctgacactgtgatcatctttgacagtgactggaatccccaccaggacctgcaagcacaggatcgagcccatcgcattggacagcagaatgaggtgcgtgttcttcgcctgtgcacggtcaacagtgtggaagagaagatactggctgctgccaaatacaaactcaatgtggatcagaaggtgatccaggcaggcatgttcgaccagaagtcgtccagccatgagaggcgtgccttcctgcaggccatcctggagcacgaggagcaggatgagagcagacactgcagcacgggcagcggcagtgccagcttcgcccacactgcccctccgccagcgggcgtcaaccccgacttggaggagccacctctaaaggaggaagatgaggtgcctgatgatgagaccgtcaaccagatgattgcccggcacgaagaagagtttgacctcttcatgcgcatggacttggaccgccggcgtgaagaagcccgcaaccccaagcggaagccacgcctgatggaagaggatgagctcccatcctggatcatcaaggatgatgccgaggtggagcggctgacatgtgaagaggaagaggagaagatgttcggccgtggttctcgccaccgcaaggaggtagactacagcgactcactgacagagaagcagtggctcaaggctatcgaggagggcacgctggaggagatcgaagaggaggtccggcagaagaaatcttcacgtaagcgtaagcgagacagcgaggccggctcctccaccccgaccaccagcacccgcagccgtgacaaggatgaggagagcaagaagcagaagaaacgtgggcggccacctgctgagaagctgtccccaaacccacctaacctcaccaagaagatgaagaagatcgtggatgctgtgatcaagtacaaagacagcagcagtggacgtcagctcagcgaggtgttcatccagctcccctctcgcaaggagcttcctgagtactatgagctcatccgaaagcctgtggacttcaagaagatcaaggaacgcatccgaaaccacaagtaccgcagcctcaatgacctggagaaggatgtgatgctgctgtgccagaacgctcagacgttcaacctcgagggttccctgatctatgaggactccatcgtcctgcagtctgtcttcaccagcgtacggcagaagattgagaaggaggacgacagtgaaggcgaggaaagcgaggaggaggaggagggcgaggaggaaggctccgagtctgagtcccgctccgtcaaggtgaagatcaagctgggccgcaaggagaaggcccaggaccgactcaaggggggccgccggcggccaagccggggatcccgggccaagccggttgtgagtgacgatgacagtgaggaggagcaggaggaggaccgctcaggaagtggcagtgaggaagactgaaccagacattcctgagtcctgaccccgaggcgctcgtcccagccaagatggagtagcccttagcagtgatgggtagcaccagatgtagtttcgaacttggagaactgtacacatgcaatcttccacatttttaggcagagaagtataggcctgtctgtcggccctggcctggcctcgagtctctaccagcattaactgtctagagaggggacctcctgggagcaccatccacctccccaggccccagtcactgtagctcagtggatgcatgcgcgtgccggccgctccttgtactgtatcttactggacagggccagctctccaggaggctcacaggcccagcgggtatgtcagtgtcactggagtcagacagtaataaattaaagcaatgacaagccaccactggctccctggactccttgctgtcagcagtggctccggggccacagagaagaaagaaagacttttaggaactgggtctaacttatgggcaaagtacttgccttgccaggtgtatgggttttgcattcccatcacccacacaccctaaacaagccaagtcagtgagcttcaagttagagcctccacctcaatgtgtacgtggaaagcaatcaaagatgatgcctagcatccacctctggccctcatgtgcagatgtacacacactgaattacatacacgggacacacacatccacacggaggcagtccatgacttgcactggggagatggtaccataggcgaaagtgccacaggcacagggccaggctaatttagtcctgcagtcctgtgctcttaagatgaaggcacaaagaggaaccccaggcgctccaactagcatgccaggcagtgacaagaccctgcttcaaatgaatcagagcccacattcagtattgccctcttacccgatgcgatgcccatgccctcacatatgaatgtgtatatatacatacatacgtaaaataattcttttttaaattatagacatttttgtgtgaatgttttgcctgaatgtgtgtgtgtgtgtgtgtgtgtgtgtgtgtgtgtgtgtgtgtgtatcaagtacattcctagagcctacagaggtcaagggagggcattggatctggaactggagtcacatgaggctgtgagcaactgtgtgggttcctgggcctttgcaacagcagttagtactcttcaccactgagccatttctccaatctcaaaaagaagcattcttttaaatgaagactgaaataaataagtaggacttgccttgg

SEQ ID NO: 211 - protein, 1647 aa, Mus musculus
MSTPDPPLGGTPRPGPSPGPGPSPGAMLGPSPGPSPGSAHSMMGPSPGPPSAGHPMPTQGPGGYPQDNMHQMHKPMESMHEKGMPDDPRYNQMKGMGMRSGAHTGMAPPPSPMDQHSQGYPSPLGGSEHASSPVPASGPSSGPQMSSGPGGAPLDGSDPQALGQQNRGPTPFNQNQLHQLRAQIMAYKMLARGQPLPDHLQMAVQGKRPMPGMQQQMPTLPPPSVSATGPGPGPGPGPGPGPGPAPPNYSRPHGMGGPNMPPPGPSGVPPGMPGQPPGGPPKPWPEGPMANAAAPTSTPQKLIPPQPTGRPSPAPPAVPPAASPVMPPQTQSPGQPAQPAPLVPLHQKQSRITPIQKPRGLDPVEILQEREYRLQARIAHRIQELENLPGSLAGDLRTKATIELKALRLLNFQRQLRQEVVVCMRRDTALETALNAKAYKRSKRQSLREARITEKLEKQQKIEQERKRRQKHQEYLNSILQHAKDFREYHRSVTGKLQKLTKAVATYHANTEREQKKENERIEKERMRRLMAEDEEGYRKLIDQKKDKRLAYLLQQTDEYVANLTELVRQHKAAQVAKEKKKKKKKKKAENAEGQTPAIGPDGEPLDETSQMSDLPVKVIHVESGKILTGTDAPKAGQLEAWLEMNPGYEVAPRSDSEESGSEEEEEEEEEEQPQPAQPPTLPVEEKKKIPDPDSDDVSEVDARHIIENAKQDVDDEYGVSQALARGLQSYYAVAHAVTERVDKQSALMVNGVLKQYQIKGLEWLVSLYNNNLNGILADEMGLGKTIQTIALITYLMEHKRINGPFLIIVPLSTLSNWAYEFDKWAPSVVKVSYKGSPAARRAFVPQLRSGKFNVLLTTYEYIIKDKHILAKIRWKYMIVDEGHRMKNHHCKLTQVLNTHYVAPRRLLLTGTPLQNKLPELWALLNFLLPTIFKSCSTFEQWFNAPFAMTGEKVDLNEEETILIIRRLHKVLRPFLLRRLKKEVEAQLPEKVEYVIKCDMSALQRVLYRHMQAKGVLLTDGSEKDKKGKGGTKTLMNTIMQLRKICNHPYMFQHIEESFSEHLGFTGGIVQGLDLYRASGKFELLDRILPKLRATNHKVLLFCQMTSLMTIMEDYFAYRGFKYLRLDGTTKAEDRGMLLKTFNEPGSEYFIFLLSTRAGGLGLNLQSADTVIIFDSDWNPHQDLQAQDRAHRIGQQNEVRVLRLCTVNSVEEKILAAAKYKLNVDQKVIQAGMFDQKSSSHERRAFLQAILEHEEQDESRHCSTGSGSASFAHTAPPPAGVNPDLEEPPLKEEDEVPDDETVNQMIARHEEEFDLFMRMDLDRRREEARNPKRKPRLMEEDELPSWIIKDDAEVERLTCEEEEEKMFGRGSRHRKEVDYSDSLTEKQWLKAIEEGTLEEIEEEVRQKKSSRKRKRDSEAGSSTPTTSTRSRDKDEESKKQKKRGRPPAEKLSPNPPNLTKKMKKIVDAVIKYKDSSSGRQLSEVFIQLPSRKELPEYYELIRKPVDFKKIKERIRNHKYRSLNDLEKDVMLLCQNAQTFNLEGSLIYEDSIVLQSVFTSVRQKIEKEDDSEGEESEEEEEGEEEGSESESRSVKVKIKLGRKEKAQDRLKGGRRRPSRGSRAKPVVSDDDSEEEQEEDRSGSGSEED

SEQ ID NO: 212 - DNA, 6376 bp, Mus musculus; identical to SEQ ID NO: 204

SEQ ID NO: 213 - protein, 136 aa, Homo sapiens
MARTKQTARKSTGGKAPRKQLATKAARKSAPATGGVKKPHRYRPGTVALREIRRYQKSTELLIRKLPFQRLVREIAQDFKTDLRFQSSAVMALQEACEAYLVGLFEDTNLCAIHAKRVTIMPKDIQLARRIRGERA

SEQ ID NO: 214 - protein, 136 aa, Mus musculus; identical to SEQ ID NO: 213

SEQ ID NO: 215 - protein, 136 aa, Homo sapiens [sequence omitted]

SEQ ID NO: 216 - protein, 136 aa, Mus musculus [sequence omitted]

SEQ ID NO: 217 - protein, 136 aa, Homo sapiens
MARTKQTARKSTGGKAPRKQLATKAARKSAPSTGGVKKPHRYRPGTVALREIRRYQKSTELLIRKLPFQRLVREIAQDFKTDLRFQSAAIGALQEASEAYLVGLFEDTNLCAIHAKRVTIMPKDIQLARRIRGERA

SEQ ID NO: 218 - protein, 136 aa, Mus musculus; identical to SEQ ID NO: 217

SEQ ID NO: 219 - protein, 6 aa, Homo sapiens
RLRERK

SEQ ID NO: 220 - protein, 6 aa, Artificial Sequence
  Description of Artificial Sequence: Synthetic peptide
AAAAAA

SEQ ID NO: 221 - protein, 7 aa, Homo sapiens
DPEEDDE

SEQ ID NO: 222 - protein, 7 aa, Artificial Sequence
  Description of Artificial Sequence: Synthetic peptide
AAAAAAA

SEQ ID NO: 223 - protein, 11 aa, Homo sapiens
HAWTHRLRERK

SEQ ID NO: 224 - protein, 39 aa, Homo sapiens
ELRKKETERKMYSLRERKGHAYKEVSEPQDDDYLYCEMC

SEQ ID NO: 225 - protein, 457 aa, Artificial Sequence
  Description of Artificial Sequence: Synthetic polypeptide
MSVAFAAPRQRGKGEITPAAIQKMLDDNNHLIQCIMDSQNKGKTSECSQYQQMLHTNLVYLATIADSNQNMQSLLPAPPTQNMPMGPGGMNQSGPPPPPRSHNMPSDGMVGGGPPAPHMQNQMNGQMPGPNHMPMQGPGPNQLNMTNSSMNMPSSSHGSMGGYNHSVPSSQSMPVQNQMTMSQGQPMGNYGPRPNMSMQPNQGPMMHQQPPSQQYNMPQGGGQHYQGQQPPMGMMGQVNQGNHMMGQRQIPPYRPPQQGPPQQYSGQEDYYGDQYSHGGQGPPEGMNQQYYPDGNSQYGQQQDAYQGPPPQQGYPPQQQQYPGQQGYPGQQQGYGPSQGGPGPQYPNYPQGQGQQYGGYRPTQPGPPQPPQQRPYGYDQIMPKKPAEDENDSKGVSEASGPQNDGKQLHPPGKANISEKINKRSGPKRGKHAWTHRLRERKQLVIYEEISDPEEDDE

SEQ ID NO: 226 - DNA, 1374 bp, Artificial Sequence
  Description of Artificial Sequence: Synthetic polynucleotide
atgtctgtggctttcgcggccccgaggcagcgaggcaagggggagatcactcccgctgcgattcagaagatgttggatgacaataaccatcttattcagtgtataatggactctcagaataaaggaaagacctcagagtgttctcagtatcagcagatgttgcacacaaacttggtataccttgctacaatagcagattctaatcaaaatatgcagtctcttttaccagcaccacccacacagaatatgcctatgggtcctggagggatgaatcagagcggccctcccccacctccacgctctcacaacatgccttcagatggaatggtaggtgggggtcctcctgcaccgcacatgcagaaccagatgaacggccagatgcctgggcctaaccatatgcctatgcagggacctggacccaatcaactcaatatgacaaacagttccatgaatatgccttcaagtagccatggatccatgggaggttacaaccattctgtgccatcatcacagagcatgccagtacagaatcagatgacaatgagtcagggacaaccaatgggaaactatggtcccagaccaaatatgagtatgcagccaaaccaaggtccaatgatgcatcagcagcctccttctcagcaatacaatatgccacagggaggcggacagcattaccaaggacagcagccacctatgggaatgatgggtcaagttaaccaaggcaatcatatgatgggtcagagacagattcctccctatagacctcctcaacagggcccaccacagcagtactcaggccaggaagactattacggggaccaatacagtcatggtggacaaggtcctccagaaggcatgaaccagcaatattaccctgatggaaattcacagtatggccaacagcaagatgcataccagggaccacctccacaacagggatatccaccccagcagcagcagtacccagggcagcaaggttacccaggacagcagcagggctacggtccttcacagggtggtccaggtcctcagtatcctaactacccacagggacaaggtcagcagtatggaggatatagaccaacacagcctggaccaccacagccaccccagcagaggccttatggatatgaccagatcatgcccaagaagccagcagaggacgaaaatgattcgaagggagtgtcagaagcatctggcccacaaaacgatgggaaacaactgcaccccccaggaaaagcaaatatttctgagaagattaataagagatctggacccaaaagggggaaacatgcctggacccacagactgcgtgagagaaagcagctggtgatttatgaagagatcagtgaccctgaggaagatgacgagtaa

SEQ ID NO: 227 - DNA, 21 bp, Artificial Sequence
  Description of Artificial Sequence: Synthetic oligonucleotide
cagtcactgacagttaataaa

SEQ ID NO: 228 - DNA, 48 bp, Artificial Sequence
  Description of Artificial Sequence: Synthetic oligonucleotide
cctaaggttaagtcgccctcgctcgagcgagggcgacttaaccttagg

SEQ ID NO: 229 - protein, 22 aa, Artificial Sequence
  Description of Artificial Sequence: Synthetic peptide
  MOD_RES (1)..(1): Ubiquitinated-Lys
  MOD_RES (20)..(21): Ubiquitinated-Lys
KVTIAQGGVLPNIQAVLLPKKT

SEQ ID NO: 230 - protein, 10 aa, Homo sapiens
WTHRLRERKQ

SEQ ID NO: 231 - protein, 35 aa, Artificial Sequence
  Description of Artificial Sequence: Synthetic polypeptide
SGPKRGKHAWTHRLRERKQLVIYEEISDPEEDDEL

SEQ ID NO: 232 - protein, 34 aa, Homo sapiens
SGPKRGKHAWTHRLRERKQLVIYEEISDPEEDDE

SEQ ID NO: 233 - protein, 34 aa, Homo sapiens
SGPKRGEHAWTHRLRERKQLVIYEEISDPEEDDE

SEQ ID NO: 234 - protein, 34 aa, Homo sapiens
SGPKRGKHAWTHRLRERKQLVVYEEISDPEEDDE

SEQ ID NO: 235 - protein, 34 aa, Homo sapiens
SGPKRGKHAWTHRVRERKQLVIYEEISDPQEDDE

SEQ ID NO: 236 - protein, 34 aa, Homo sapiens
SGPKRGKHAWTHRLRERKQLVIYEEISDPEEDDK

SEQ ID NO: 237 - protein, 34 aa, Homo sapiens
SGPKRGRHAWTHRLRERNQLVIYEEIRDPEEDDE

SEQ ID NO: 238 - protein, 36 aa, Homo sapiens
KLELRRKETEGKMYSLRERKGHAYKEISEPQDDDYL

SEQ ID NO: 239 - protein, 36 aa, Homo sapiens
KLELRKKETERKMYSLRERKGHAYKEVSEPQDDDYL

SEQ ID NO: 240 - protein, 36 aa, Equus sp.
KLELRRKEVGVKMYSLRERKGHAYQEVSEPQDDDYL

SEQ ID NO: 241 - protein, 34 aa, Sarcophilus harrisii
ECRKKDAAVHIYNLRERKYPIYQEIWDPQDDDYL

SEQ ID NO: 242 - protein, 38 aa, Salmo salar
EWLERQKALNTYKRGRNLRDRPRITYTEEEVPKDDHYL

SEQ ID NO: 243 - protein, 36 aa, Esox lucius
LRGQTQDLNYQHGKNLRDRTRVSYIEEEEPKDDHFL

SEQ ID NO: 244 - protein, 39 aa, Homo sapiens
ELRRKETEGKMYSLRERKGHAYKEISEPQDDDYLYCEMC

1. A method of treating a subject afflicted with synovial sarcoma comprising administering to the subject a therapeutically effective amount of an agent that inhibits binding of a SS18-SSX fusion protein to a nucleosome, optionally wherein the nucleosome is an H2A K119Ub-marked nucleosome, optionally wherein
a) the SS18-SSX fusion protein comprises a C-terminal region containing a basic region, and an acidic region of a SSX protein, further optionally wherein the basic region comprises a minimal 34-amino acid region;
b) the SS18-SSX fusion protein is selected from Table 2;
c) the SS18-SSX fusion protein comprises SS18 protein fused with a c-terminal portion of a SSX protein;
d) the SS18-SSX fusion protein comprises c-terminal 34 amino acids (aa155-188) of a SSX protein;
e) the SS18-SSX fusion protein comprises c-terminal 78 amino acids (aa 111-188) of a SSX protein;
f) the SSX protein is selected form the group consisting of human SSX1, SSX2, SSX3, SSX4, SSX6, SSX7, SSX8, and SSX9;
g) the SS18-SSX fusion protein comprises W164, R167, L168, R169 and/or R171 of SEQ ID: 3, 7, 13, 17, 21, 25, or 31, or orthologs thereof;
h) the SS18-SSX fusion protein is a part of a BAF complex;
i) the nucleosome comprises H2A protein comprising E56, E64, D90, E91, E92 and/or E113 of human, mouse, rat, or Xenopus H2A, or orthologs thereof; and/or H2B protein comprising E105 and/or E113 of human, mouse, rat, or Xenopus H2B, or orthologs thereof;
j) the subject is an animal model of the cancer, optionally wherein the animal model is a mouse model; and/or
k) the subject is a mammal, optionally wherein the mammal is a mouse or a human.

2-3. (canceled)

4. The method of claim 1, wherein the agent
a) inhibits binding of the basic region of the SS18-SSX fusion protein to an acidic patch of the nucleosome, optionally wherein the nucleosome is an H2A K119Ub-marked nucleosome;
b) is a small molecule inhibitor, a small molecule degrader, CRISPR guide RNA (gRNA), RNA interfering agent, oligonucleotide, peptide or peptidomimetic inhibitor, aptamer, antibody, or intrabody, optionally wherein the RNA interfering agent is a small interfering RNA (siRNA), CRISPR RNA (crRNA), CRISPR guide RNA (gRNA), a small hairpin RNA (shRNA), a microRNA (miRNA), or a piwi-interacting RNA (piRNA);
c) comprises an antibody and/or intrabody, or an antigen binding fragment thereof, which specifically binds to the SS18-SSX fusion protein, the SSX tail, and/or the H2AK119Ub-marked nucleosome, optionally wherein the SSX tail is SSX tail (34 amino acid) and/or SSX tail (78 amino acid);
d) comprises an antibody and/or intrabody, or an antigen binding fragment thereof, which specifically binds to at least one of the following regions:
(1) the basic region of the SS18-SSX fusion protein;
(2) the acidic region of the SS18-SSX fusion protein;
(3) the acidic patch of the H2AK119Ub-marked nucleosome; and/or
(4) the H2AK119Ub mark,
further optionally wherein the antibody and/or intrabody, or antigen binding fragment thereof, i) is chimeric, humanized, composite, or human, and/or ii) comprises an effector domain, comprises an Fc domain, and/or is selected from the group consisting of Fv, Fav, F(ab′)2, Fab′, dsFv, scFv, sc(Fv)2, and diabodies fragments;
e) induces deletion or mutation of the basic region of the SS18-SSX fusion protein, the acidic region of the SS18-SSX fusion protein, the acidic patch of the H2AK119Ub-marked nucleosome, and/or a region within the SSX tail (34 amino acid);
f) inhibits H2A ubiquitination;
g) inhibits ubiquitin ligase activity of a PRC1 complex;
h) reduces expression, copy number, and/or ubiquitin ligase activity of RING1A and/or RING1B;
i) inhibits recruitment of a SS18-SSX fusion protein-bound BAF complex to an H2AK119Ub-marked nucleosome;
j) inhibits activation of at least one oncogenic target gene of the SS18-SSX fusion protein, optionally wherein the oncogenic target gene of the SS18-SSX fusion protein is selected from the group consisting of WNT16 and oncogenic target genes listed in McBride et al. (2018) Cancer Cell 33:1128-1141;
k) reduces the number of viable or proliferating cells in the cancer, and/or reduces the volume or size of a tumor comprising the cancer cells; and/or
l) is administered in a pharmaceutically acceptable formulation.

5-18. (canceled)

19. The method of claim 1, further comprising administering to the subject il an immunotherapy and/or cancer therapy and/or 2) at least one additional therapeutic agent or regimen for treating the cancer, optionally wherein
a) the immunotherapy and/or cancer therapy is administered before, after, or concurrently with the agent,
b) the immunotherapy is cell-based;
c) the immunotherapy comprises a cancer vaccine and/or virus;
d) the immunotherapy inhibits an immune checkpoint, optionally wherein the immune checkpoint is selected from the group consisting of CTLA-4, PD-1, VISTA, B7-H2, B7-H3, PD-L1, B7-H4, B7-H6, ICOS, HVEM, PD-L2, CD160, gp49B, PIR-B, KIR family receptors, TIM-1, TIM-3, TIM-4, LAG-3, GITR, 4-IBB, OX-40, BTLA, SIRPalpha (CD47), CD48, 2B4 (CD244), B7.1, B7.2, ILT-2, ILT-4, TIGIT, HHLA2, butyrophilins, and A2aR; and/or
e) the cancer therapy is selected from the group consisting of radiation, a radiosensitizer, and a chemotherapy.

20-25. (canceled)

26. A method of reducing viability or proliferation of synovial sarcoma cells comprising contacting the synovial sarcoma cells with an agent that inhibits binding of a SS18-SSX fusion protein according to claim 1 to a nucleosome, optionally wherein the nucleosome is an H2AK119Ub-marked nucleosome and/or the step of administering or contacting occurs in vivo, ex vivo, or in vitro.

27-28. (canceled)

29. The method of claim 26, wherein the agent is as according to claim 4.

30-42. (canceled)

43. The method of claim 26, further comprising contacting the cancer cells with an immunotherapy and/or cancer therapy, optionally wherein
a) the immunotherapy and/or cancer therapy is administered before, after, or concurrently with the agent,
b) the immunotherapy is cell-based;
c) the immunotherapy comprises a cancer vaccine and/or virus;
d) the immunotherapy inhibits an immune checkpoint, optionally wherein the immune checkpoint is selected from the group consisting of CTLA-4, PD-1, VISTA, B7-H2, B7-H3, PD-L1, B7-H4, B7-H6, ICOS, HVEM, PD-L2, CD160, gp49B, PIR-B, KIR family receptors, TIM-1, TIM-3, TIM-4, LAG-3, GITR, 4-IBB, OX-40, BTLA, SIRPalpha (CD47), CD48, 2B4 (CD244), B7.1, B7.2, ILT-2, ILT-4, TIGIT, HHLA2, butyrophilins, and A2aR; and/or
e) the cancer therapy is selected from the group consisting of radiation, a radiosensitizer, and a chemotherapy.

44-48. (canceled)

49. A method of assessing the efficacy of the agent according to claim 26 for treating synovial sarcoma in a subject, comprising;
a) detecting in a subject sample at a first point in time the number of viable and/or proliferating cancer cells;
b) repeating step a) during at least one subsequent point in time after administration of the agent; and
c) comparing number of viable and/or proliferating cancer cells detected in steps a) and b), wherein the absence of, or a significant decrease in number of viable and/or proliferating cancer cells in the subsequent sample as compared to the amount in the sample at the first point in time, indicates that the agent treats synovial sarcoma in the subject.

50. The method of claim 49, wherein
a) between the first point in time and the subsequent point in time, the subject has undergone treatment, completed treatment, and/or is in remission for synovial sarcoma;
b) the first and/or at least one subsequent sample is selected from the group consisting of ex vivo and in vivo samples;
c) the first and/or at least one subsequent sample is obtained from an animal model of synovial sarcoma;
d) the first and/or at least one subsequent sample is a portion of a single sample or pooled samples obtained from the subject;
e) the sample comprises cells, serum, peritumoral tissue, and/or intratumoral tissue obtained from the subject;
f) the method further comprises determining responsiveness to the agent by measuring at least one criteria selected from the group consisting of clinical benefit rate, survival until mortality, pathological complete response, semi-quantitative measures of pathologic response, clinical complete remission, clinical partial remission, clinical stable disease, recurrence-free survival, metastasis free survival, disease free survival, circulating tumor cell decrease, circulating marker response, and RECIST criteria.

51-57. (canceled)

58. A cell-based assay for screening for agents that reduce viability or proliferation of a synovial sarcoma cell comprising;
a) contacting the synovial sarcoma cell with a test agent; and
b) determining the ability of the test agent to inhibit binding of a SS18-SSX fusion protein according to claim 1, a SSX (78 amino acid) region, and/or a SSX (34 amino acid) minimal region to a nucleosome, optionally wherein the nucleosome is a H2AK119Ub-marked nucleosome and/or the step of contacting occurs in vivo, ex vivo, or in vitro.

59-61. (canceled)

62. The cell-based assay of claim 58, further comprising
a) determining the ability of the test agent to inhibit recruitment of a SS18-SSX fusion protein-bound BAF complex to an H2AK119Ub-marked nucleosome and/or H2AK 119Ub-marked region of chromatin in cells, optionally wherein the cellular chromatin comprises a PRC1/H2A Ub domain;
b) determining the ability of the test agent to inhibit activation of at least one oncogenic target gene of the SS18-SSX fusion protein, optionally wherein the oncogenic target gene of the SS18-SSX fusion protein is selected from the group consisting of WNT16 and oncogenic target genes listed in McBride et al. (2018) Cancer Cell 33:1128-1141; and/or
c) determining a reduction in the viability or proliferation of the cancer cells.

63-65. (canceled)

66. An in vitro assay for screening for agents that reduce viability or proliferation of a synovial sarcoma cell comprising;
a) mixing a protein comprising a c-terminal basic region and a c-terminal acidic region of a SSX protein and a nucleosome together, optionally wherein the nucleosome is a H2AK119Ub-marked nucleosome;
b) adding a test agent to the mixture; and
c) determining the ability of the test agent to decrease binding of the protein to the nucleosome.

67. The in vitro assay of claim 66, wherein the protein
a) comprises c-terminal 34 amino acids (aa155-188) of a SSX protein, optionally wherein the SS18-SSX fusion protein is selected from Table 2; and/or
b) comprises c-terminal 78 amino acids (aa 111-188) of a SSX protein, optionally wherein the SS18-SSX fusion protein is selected from Table 2.

68-81. (canceled)

82. An isolated modified protein complex selected from the group consisting of protein complexes listed in Table 3, wherein the isolated modified protein complex comprises at least one subunit that is modified, optionally wherein the at least one modified subunit is a fragment of the subunit.

83. (canceled)

84. The isolated modified protein complex of claim 82, wherein the fragment of the subunit
a) binds to at least one binding partner of the subunit to form the isolated modified protein complex;
b) comprises the basic region and/or the acidic region of a SSX protein;
c) comprises c-terminal 34 amino acids (aa155-188) of a SSX protein;
d) comprises c-terminal 78 amino acids (aa 111-188) of a SSX protein; and/or
e) comprises the acidic patch of a nucleosome and/or the H2A K119 Ub mark.

85-87. (canceled)

88. The isolated modified protein complex of claim 82, wherein the SSX protein is selected form the group consisting of human SSX1, SSX2, SSX3, SSX4, SSX6, SSX7, SSX8, and SSX9.

89. (canceled)

90. The isolated modified protein complex of claim 82, wherein at least one subunit
a) is linked to at least another subunit;
b) is linked to at least another subunit through covalent cross-links;
c) is linked to at least another subunit through a peptide linker;
d) comprises a heterologous amino acid sequence; and/or
e) is selected from the group consisting of HA-SS18-SSX1, V5-SS18-SSX1, V5-SS18-SSX1 34aa tail, V5-SS18-SSX1 78aa tail, H2A, and H2B.

91-93. (canceled)

94. The isolated modified protein complex of claim 90, wherein the heterologous amino acid sequence comprises an affinity tag or a label.

95. The isolated modified protein complex of claim 94, wherein the affinity tag is selected from the group consisting of Glutathione-S-Transferase (GST), calmodulin binding protein (CBP), protein C tag, Myc tag, HaloTag, HA tag, Flag tag, His tag, biotin tag, and V5 tag.

96. The isolated modified protein complex of claim 95, wherein the label is a fluorescent protein.

97. (canceled)

98. A pharmaceutical composition comprising the isolated modified protein complex according to claim 82 and a carrier.
